(19) United States
(12) Patent Application Publication
(10) Pub. No.: US 2014/0294834 A1
(43) Pub. Date: Oct. 2, 2014

(54) TANDEM FC BISPECIFIC ANTIBODIES

(71) Applicant: MERRIMACK PHARMACEUTICALS, INC., CAMBRIDGE, MA (US)

(72) Inventors: Brian HARMS, Roslindale, MA (US); Neeraj KOHLI, Brighton, MA (US); Alexey LUGOVSKOY, Woburn, MA (US); Stephen SU, Boston, MA (US); Melissa GEDDIE, Somerville, MA (US)

(73) Assignee: MERRIMACK PHARMACEUTICALS, INC., CAMBRIDGE, MA (US)

(21) Appl. No.: 14/185,628

(22) Filed: Feb. 20, 2014

Related U.S. Application Data
(63) Continuation of application No. PCT/US12/52490, filed on Aug. 27, 2012.
(60) Provisional application No. 61/527,802, filed on Aug. 26, 2011.

(51) Int. Cl. C07K 16/46; C07K 16/18; C07K 16/28

(52) U.S. Cl. CPC C07K 16/468; C07K 16/2863; C07K 16/2866; C07K 16/2869; C07K 16/18
USPC 424/136.1; 530/387.3; 530/389.6; 536/23.53; 435/320.1; 435/328; 435/69.6

(57) ABSTRACT

Provided herein are tandem Fcs and tandem Fc antibodies (“TFcAs”), e.g., tandem Fc bispecific antibodies (“TFcBAs”), which comprise one or at least two binding sites that specifically bind to one or more cell surface receptors. The binding sites are connected through a TFc, which TFc comprises a first Fc region and a second Fc region, wherein the first and the second Fc regions are linked through a TFc linker to form a contiguous polypeptide and dimerize to form an Fc dimer. Exemplary TFcBAs inhibit signal transduction through the cell surface receptor(s) for which the binding sites of the TFcBA are specific.

### RELATED APPLICATIONS

[0001] This application claims priority to U.S. Provisional Application No. 61/527,802, filed Aug. 26, 2011. Where permitted, the foregoing applications are incorporated by reference, each in its entirety, for any and all purposes.

### BACKGROUND

[0002] It has been established that tumor cells express receptors for growth factors and cytokines that stimulate proliferation of the cells and, moreover, that antibodies to such receptors can be effective in blocking the stimulation of cell proliferation mediated by growth factors and cytokines to inhibit tumor cell growth. Commercially available therapeutic antibodies that target receptors on cancer cells include, for example, trastuzumab (Herceptin®) for the treatment of breast cancer, which targets the HER2 receptor (also known as ErbB2), and cetuximab (Erbitux®) for the treatment of colorectal cancer and head and neck cancer, which targets the epidermal growth factor receptor (EGFR, also known as HER1 or ErbB1).

[0003] While this approach of administering a therapeutic agent comprising only a single therapeutic monoclonal antibody (when administered in the absence of administration of another therapeutic antibody, referred to herein as monotherapy) has shown considerable success in cancer treatment, there are a number of factors that can lead to failure of such treatment or recurrence of tumor growth after initial inhibition. For example, certain tumors rely on more than one growth factor-mediated signal transduction pathway for cell proliferation and thus targeting of a single pathway may prove insufficient to significantly affect tumor cell growth. Alternatively, even in cases where one pathway is the only or predominant growth-stimulatory pathway, certain tumors cells are capable of activating another signaling pathway for growth stimulation when the original one is blocked by antibody (innate resistance to treatment). Still further, some tumors exhibit initial responsiveness to antibody monotherapy but later develop resistance to treatment by switching to use of another signaling pathway (acquired resistance to treatment).

[0004] Accordingly, additional therapeutic approaches for cancer treatment are needed to overcome limitations of antibody monotherapy and to provide other benefits.

### SUMMARY

[0005] Provided herein are engineered antibodies, such as Tandem Fc Antibodies (“TFcAs”). Exemplary TFcAs are Tandem Fc Bispecific Antibodies (TFcBAs). A TFcBA comprises a Tandem Fc, which is a polypeptide moiety that comprises a first Fc region and a second Fc region, each of said first Fc region and second Fc region having a C-terminus and an N-terminus; the first Fc region and the second Fc region are linked as a single polypeptide chain through a TFc linker having a C-terminus and an N-terminus (i.e., the C-terminus of the first Fc region is linked by a peptide bond to the N-terminus of the TFc linker, the C-terminus of which TFc linker is in turn linked by a peptide bond to the N-terminus of the second Fc region). A TFcBA may comprise at least two binding sites (at least a first binding site and a second binding site). Each such binding site binds specifically to a specific part of a cell surface receptor. Exemplary cell surface receptors are those that are expressed or overexpressed by cancer cells. Exemplary binding sites include antibody-derived binding sites that bind immunospecifically to an extracellular domain of a cell surface receptor. The first or the second binding site of a TFcA or TFcBA may bind specifically to a human receptor protein selected from the group consisting of ErbB2, ErbB3 (e.g., a binding site described in U.S. Pat. No. 7,846,440), ErbB4, IGF1R, IGF2R, Insulin receptor, RON, c-Met, EGFR, VEGFR1, VEGFR2, TNFR, FGFR1-4, PDGFR (alpha and beta), c-Kit, EPCAM and EphA2. Typically such binding will be specific to the extracellular portion of the receptor protein. In certain embodiments disclosed herein, one of the at least two binding sites comprised by a TFcBA is a binding site specific to c-Met, e.g., an anti-c-Met Fab or an anti-cMet scFv. In certain exemplified embodiments a TFcBA is provided that comprises a single anti-c-Met binding site and at least one second binding site that does not bind to c-Met, e.g., a binding site specific to ErbB2, ErbB3, ErbB4, IGF1R, IGF2R, Insulin receptor, RON, EGFR, VEGFR1, VEGFR2, TNFR, FGFR1-4, PDGFR (alpha and beta), c-Kit, EPCAM and EphA2, wherein the anti-c-Met binding site and the second binding site are linked through a TFc to form a contiguous polypeptide. TFcBAs are provided that bind to two epitopes (e.g., extracellular epitopes) on a single receptor or to two distinct cell surface receptors and which, upon such binding, strongly inhibit signal transduction that is normally stimulated by a cognate ligand of at least one cell surface receptor to which the TFcBA binds. For example, an anti-c-Met+anti-EGFR TFcBA may inhibit signal transduction induced by either or both of HGF (hepatocyte growth factor, the cognate ligand of C-met) and EGF (epidermal growth factor, the cognate ligand of EGFR), or an anti-c-Kit+anti-RON TFcBA may inhibit signal transduction induced by either or both of Macrophage Stimulating Protein (the cognate ligand of RON) and Stem Cell Factor (the cognate ligand of c-Kit), or an anti-c-Met+anti-EPCAM TFcBA may inhibit signal transduction induced by HGF; each such inhibition being with an IC50 of 10 nM or less or 1 nM or less or 100 pM or less, or with a maximal percent inhibition of at least 70% or at least 80% or at least 90%, as indicated by inhibition of ligand-induced phosphorylation of the receptor(s) that are signal transduction inhibited by the TFcBA. In certain embodiments, expression of the TFcBA in a cell produces (i) more (i.e. a greater percentage of) correctly formed TFcAB molecules relative to the expression of a multivalent antibody that binds to the same receptor(s) but does not comprise a TFc or (ii) more than 80% of correctly formed TFcAB molecules as determined, e.g., by Size Exclusion Chromatography (SEC).

[0006] Also provided herein are Abs which are TFcBAs, wherein the TFcBAs comprise a first binding site and a second binding site, wherein the first binding site binds to a first target and the second binding site binds to a second target, and wherein (i) the first and the second binding sites are linked through a TFc; (ii) the TFc comprises a first Fc region and a second Fc region, each said first Fc region and second Fc region having a C-terminus and an N-terminus; (iii) the first Fc region and the second Fc region are linked through a TFc linker having a C-terminus and an N-terminus to form a contiguous polypeptide; (iv) the first and the second Fc regions associate (bind) to form an Fc dimer; and (v) either or both of the first and the second Fc region comprise one or more amino acid (aa) modification to enhance or stabilize the binding between the first and the second Fc region. The TFcBA may inhibit signal transduction through either or both of the first and the second target. In certain embodiments, expression of the TFcBA in a host cell produces (i) more correctly formed TFcAB molecules relative to the expression in a matched host cell of a multivalent antibody that binds to the same receptor(s) but does not comprise a TFc or (ii) more than 80% of correctly formed TFcBA molecules as determined, e.g., by SEC.

[0007] Further provided herein are monovalent tandem FC antibodies (TFcAs). A monovalent TFcA may comprise a single binding site that binds to a target, wherein the binding site is linked to a TFc comprising a first Fc region and a second Fc region, each said first Fc region and second Fc region having a C-terminus and an N-terminus; and wherein (i) the first Fc region and the second Fc region are linked through a TFc linker having a C-terminus and an N-terminus to form a contiguous polypeptide; (ii) the first and the second Fc regions associate to form an Fc dimer; and (iii) either or both of the first and the second Fc region comprise one or more aa modification to enhance or stabilize the binding between the first and the second Fc region. The monovalent TFcA may inhibit signal transduction through the target. In certain embodiments, expression of the monovalent TFcA in a host cell produces (i) more correctly formed TFcA molecules relative to the expression in a matched host cell of an antibody that does not comprise a TFc or (ii) more than 80% of correctly formed TFcA molecules as determined, e.g., by SEC.

[0008] The first Fc region and the second Fc region of a TFc comprised by a TFcA, such as a TFcBA, may comprise a first and a second CH3 domain, respectively, each said CH3 domain having a C-terminus and an N-terminus. The first and the second Fc regions of a TFc comprised by a TFcA may comprise a first and a second CH2 domain, respectively, each said CH2 domain having a C-terminus and an N-terminus. The first and the second Fc regions of a TFc comprised by a TFcA may comprise a first and a second hinge, respectively, each said first hinge and said second hinge having a C-terminus and an N-terminus. In certain embodiments, the second hinge does not comprise an upper hinge subdomain. The TFc comprised in the TFcA may comprise in amino to carboxyl terminal order: a first CH2 domain, a first CH3 domain, a TFc linker, a second CH2 domain and a second CH3 domain. The TFc comprised in the TFcA may comprise in amino to carboxyl terminal order: a first hinge, a first CH2 domain, a first CH3 domain, a TFc linker, a second CH2 domain and a second CH3 domain. The TFc comprised in the TFcA may comprise in amino to carboxyl terminal order: a first hinge, a first CH2 domain, a first CH3 domain, a TFc linker, a second hinge, a second CH2 domain and a second CH3 domain. The first hinge may comprise an upper hinge subdomain, a core hinge subdomain and a lower hinge subdomain and the second hinge may comprise a core hinge subdomain and a lower hinge subdomain, but not an upper hinge subdomain, each said hinge sub-domain having a C-terminus and an N-terminus. The TFc comprised by the TFcA may comprise in amino to carboxyl terminal order: a first hinge, which is linked at its C-terminus to the N-terminus of a first CH2 domain, which is linked at its C-terminus to the N-terminus of a first CH3 domain, which is linked at its C-terminus to the N-terminus of a TFc linker, which is linked at its C-terminus to the N-terminus of a second hinge, which is linked at its C-terminus to the N-terminus of a second CH2 domain, which is linked at its C-terminus to the N-terminus of a second CH3 domain.

[0009] A TFc linker of a TFc comprised by a TFcA may comprise 20-50 aas. A TFc linker may be a Gly-Ser linker, such as (Gly₄Ser)ₙ, wherein n is 4, 5, 6, 7 or 8. A TFc linker may also comprise an aa sequence that is at least about 70%, 80%, 90%, 95%, 97%, 98%, or 99% identical to an aa sequence of a Gly-Ser linker or which differs therefrom in at most 20, 15, 10, 5, 4, 3, 2, or 1 aa addition, deletion or substitution.

[0010] A TFc of a TFcA may be an IgG1 TFc. A TFc may be a hybrid TFc, e.g., an IgG1/IgG4 hybrid TFc. A TFc of a TFcA may be an IgG1 TFc and may comprise in amino to carboxyl terminal order: a first IgG1 hinge, a first IgG1 CH2 domain, a first IgG1 CH3 domain, a TFc linker, a second IgG1 hinge, a second IgG1 CH2 domain, and a second IgG1 CH3 domain. A hybrid TFc may comprise in amino to carboxyl terminal order: a first IgG1/IgG4 hinge, a first IgG4 CH2 domain, a first IgG1 CH3 domain, a TFc linker, a second IgG4 hinge, a second IgG4 CH2 domain, and a second IgG1 CH3 domain.

[0011] Either or both of the first CH3 domain and the second CH3 domain of a TFc may comprise one or more aa modifications that enhance or stabilize the binding between the first and the second Fc regions, as evidenced, e.g., by an essentially uniform product (or band) on a non-denaturing SDS-Page gel. Each of the first CH3 domain and the second CH3 domain of a TFc may comprise an amino acid modification, which modification is an Association Enhancing Modification (“AEM”) that enhances the association of the first CH3 domain with the second CH3 domain. An AEM may be comprised by a module selected from the group consisting of AEM module 1, AEM module 2, AEM module 3 and AEM module 4. Either or both of the first Fc region and the second Fc region of a TFc may comprise an aa modification that adds a cysteine as an insertion or replacement, which cysteine forms a disulfide bond with a cysteine in the other Fc region (a “DiS” modification). Either or both of the first and the second Fc region of a TFc may comprise a DiS modification in a hinge. In certain embodiments, either or both of the first and the second Fc region comprise a DiS modification in a CH3 domain. The DiS modification may be comprised by DiS module 1 or DiS module 2. Each of the first CH3 domain and the second CH3 domain of a TFc may comprise one or more AEM modifications and one or more DiS modifications.

[0012] Either or both of the first and the second CH3 domains of a TFc may comprise an aa sequence that is at least 70%, 80%, 90%, 95%, 97%, 98%, or 99% identical to an aa sequence of a CH3 domain provided herein, e.g., selected from the group consisting of SEQ ID NOs:27-98, or which differs therefrom in at most 30, 25, 20, 15, 10, 5, 4, 3, 2, or 1 aa additions, deletions or substitutions. In certain embodiments, if the aa sequence of a CH3 domain is not identical to a sequence selected from the group of sequences SEQ ID NOs:27-98, then the aa sequence of the CH3 domain nevertheless comprises the particular AEM and/or DiS of the sequence to which it is similar. The first CH3 domain or the second CH3 domain of a TFc may comprises an aa sequence provided herein, e.g., selected from the group consisting of SEQ ID NOs:27-98. The first CH3 and second CH3 domains of a TFc together may comprise a pair of two different members, each member being a CH3 aa sequence, each pair selected from the group of pairs consisting of SEQ ID NOs:31 and 35; SEQ ID NOs:33 and 37; SEQ ID NOs:39 and 43; SEQ ID NOs:41 and 45; SEQ ID NOs:47 and 51; SEQ ID NOs:49 and 53; SEQ ID NOs:55 and 59; SEQ ID NOs:57 and 61; SEQ ID NOs:63 and 67; SEQ ID NOs:65 and 69; SEQ ID NOs:71 and 73; SEQ ID NOs:72 and 74; SEQ ID NOs:75 and 79; SEQ ID NOs:77 and 81; SEQ ID NOs:83 and 85; SEQ ID NOs:84 and 86; SEQ ID NOs:87 and 89; SEQ ID NOs:88 and 90; SEQ ID NOs:91 and 93; SEQ ID NOs:92 and 94; SEQ ID NOs:95 and 97; and SEQ ID NOs:96 and 98, each member aa sequence being at least 70%, 80%, 90%, 95%, 97%, 98%, or 99% identical to, or differing in at most 30, 25, 20, 15, 10, 5, 4, 3, 2, or 1 aa additions, deletions or substitutions from the each sequence of each said pair, wherein the first CH3 domain comprises a different member of the pair than is comprised by the second CH3 domain. The first and the second CH3 domains of a TFc may each comprise an aa sequence that identical to an aa sequence of a member of the pair of CH3 aa sequences selected from the group consisting of SEQ ID NOs:31 and 35; SEQ ID NOs:33 and 37; SEQ ID NOs:39 and 43; SEQ ID NOs:41 and 45; SEQ ID NOs:47 and 51; SEQ ID NOs:49 and 53; SEQ ID NOs:55 and 59; SEQ ID NOs:57 and 61; SEQ ID NOs:63 and 67; SEQ ID NOs:65 and 69; SEQ ID NOs:71 and 73; SEQ ID NOs:72 and 74; SEQ ID NOs:75 and 79; SEQ ID NOs:77 and 81; SEQ ID NOs:83 and 85; SEQ ID NOs:84 and 86; SEQ ID NOs:87 and 89; SEQ ID NOs:88 and 90; SEQ ID NOs:91 and 93; SEQ ID NOs:92 and 94; SEQ ID NOs:95 and 97; and SEQ ID NOs:96 and 98.

[0013] The first hinge of a TFc may comprise an aa sequence that differs in at most 3, 2 or 1 aa deletions, additions or substitutions from an aa sequence of a hinge provided herein, e.g., selected from the group consisting of SEQ ID NOs:4, 18, 19, 20, 21, 22, 263-265 and 267-273. The first hinge of a TFc may comprise an aa sequence that is an aa sequence selected from the group consisting of SEQ ID NOs:4, 18, 19, 20, 21, 22, 263-265 and 267-273. The second hinge of a TFc may comprise an aa sequence that differs in at most 3, 2 or 1 aa deletions, additions or substitutions from an aa sequence of a hinge provided herein, e.g., selected from the group consisting of SEQ ID NOs:23, 24, 263-265 and 267-273. The second hinge may comprise an aa sequence that is an aa sequence selected from the group consisting of SEQ ID NOs:23, 24, 263-265 and 267-273.

[0014] A CH2 domain of a TFc may comprise an aa sequence that is at least 70%, 80%, 90%, 95%, 97%, 98%, or 99% identical to an aa sequence of a CH2 domain provided herein, e.g., SEQ ID NO:25, 26, 261 or 262, or which differs therefrom in at most 30, 25, 20, 15, 10, 5, 4, 3, 2, or 1 aa deletions, additions or substitutions.

[0015] The TFc may comprise in amino to carboxyl terminal order: a first hinge, a first CH2 domain, a first CH3 domain, a second hinge, a second CH2 domain and a second CH3 domain, wherein (i) the first hinge comprises an aa sequence selected from the group consisting of SEQ ID NOs:4, 18, 19, 263-265 and 267-273; (ii) the first CH2 domain is aglycosylated and comprises the aa sequence set forth as SEQ ID NO:25; (iii) the first CH3 domain comprises an aa sequence that is either sequence of a pair of sequences selected from the group of pairs of CH3 domain sequences consisting of SEQ ID NOs:31 and 35; SEQ ID NOs:33 and 37; SEQ ID NOs:39 and 43; SEQ ID NOs:41 and 45; SEQ ID NOs:47 and 51; SEQ ID NOs:49 and 53; SEQ ID NOs:55 and 59; SEQ ID NOs:57 and 61; SEQ ID NOs:63 and 67; SEQ ID NOs:65 and 69; SEQ ID NOs:71 and 73; SEQ ID NOs:72 and 74; SEQ ID NOs:75 and 79; SEQ ID NOs:77 and 81; SEQ ID NOs:83 and 85; SEQ ID NOs:84 and 86; SEQ ID NOs:87 and 89; SEQ ID NOs:88 and 90; SEQ ID NOs:91 and 93; SEQ ID NOs:92 and 94; SEQ ID NOs:95 and 97; and SEQ ID NOs:96 and 98; (iv) the second hinge comprises an aa sequence consisting of a sequence selected from the group consisting of SEQ ID NO:23, 263-265 and 267-273; (v) the second CH2 domain is aglycosylated and comprises the aa sequence set forth in SEQ ID NO:25; and (vi) the second CH3 domain comprises an aa sequence that is either sequence of a pair of sequences selected from the group of pairs of CH3 domain sequences consisting of SEQ ID NOs:31 and 35; SEQ ID NOs:33 and 37; SEQ ID NOs:39 and 43; SEQ ID NOs:41 and 45; SEQ ID NOs:47 and 51; SEQ ID NOs:49 and 53; SEQ ID NOs:55 and 59; SEQ ID NOs:57 and 61; SEQ ID NOs:63 and 67; SEQ ID NOs:65 and 69; SEQ ID NOs:71 and 73; SEQ ID NOs:72 and 74; SEQ ID NOs:75 and 79; SEQ ID NOs:77 and 81; SEQ ID NOs:83 and 85; SEQ ID NOs:84 and 86; SEQ ID NOs:87 and 89; SEQ ID NOs:88 and 90; SEQ ID NOs:91 and 93; SEQ ID NOs:92 and 94; SEQ ID NOs:95 and 97; and SEQ ID NOs:96 and 98, wherein if the first CH3 domain comprises a first sequence of a pair of sequences, the second CH3 domain comprises the second sequence of the pair of sequences; and if the first CH3 domain comprises the second sequence of a pair of sequences, the second CH3 domain comprises the first sequence of the pair of sequences.

[0016] A TFc may comprise in amino to carboxyl terminal order: a first hinge, a first CH2 domain, a first CH3 domain, a second hinge, a second CH2 domain and a second CH3 domain, wherein (i) the first hinge comprises an aa sequence selected from the group consisting of SEQ ID NOs:20, 21, 22, 263-265 and 267-273; (ii) the first CH2 domain is aglycosylated and comprises the aa sequence set forth in SEQ ID NO:26; (iii) the first CH3 domain comprises an aa sequence that is either sequence of a pair of sequences selected from the group of pairs of CH3 domain sequences consisting of SEQ ID NOs:31 and 35; SEQ ID NOs:33 and 37; SEQ ID NOs:39 and 43; SEQ ID NOs:41 and 45; SEQ ID NOs:47 and 51; SEQ ID NOs:49 and 53; SEQ ID NOs:55 and 59; SEQ ID NOs:57 and 61; SEQ ID NOs:63 and 67; SEQ ID NOs:65 and 69; SEQ ID NOs:71 and 73; SEQ ID NOs:72 and 74; SEQ ID NOs:75 and 79; SEQ ID NOs:77 and 81; SEQ ID NOs:83 and 85; SEQ ID NOs:84 and 86; SEQ ID NOs:87 and 89; SEQ ID NOs:88 and 90; SEQ ID NOs:91 and 93; SEQ ID NOs:92 and 94; SEQ ID NOs:95 and 97; and SEQ ID NOs:96 and 98; (iv) the second hinge comprises an aa sequence consisting of SEQ ID NO:24, 263-265 and 267-273; (v) the second CH2 domain is aglycosylated and comprises the aa sequence set forth in SEQ ID NO:26; and (vi) the second CH3 domain comprises an aa sequence that is either sequence of a pair of sequences selected from the group of pairs of CH3 domain sequences consisting of SEQ ID NOs:31 and 35; SEQ ID NOs:33 and 37; SEQ ID NOs:39 and 43; SEQ ID NOs:41 and 45; SEQ ID NOs:47 and 51; SEQ ID NOs:49 and 53; SEQ ID NOs:55 and 59; SEQ ID NOs:57 and 61; SEQ ID NOs:63 and 67; SEQ ID NOs:65 and 69; SEQ ID NOs:71 and 73; SEQ ID NOs:72 and 74; SEQ ID NOs:75 and 79; SEQ ID NOs:77 and 81; SEQ ID NOs:83 and 85; SEQ ID NOs:84 and 86; SEQ ID NOs:87 and 89; SEQ ID NOs:88 and 90; SEQ ID NOs:91 and 93; SEQ ID NOs:92 and 94; SEQ ID NOs:95 and 97; and SEQ ID NOs:96 and 98, wherein if the first CH3 domain comprises a first sequence of a pair of sequences, the second CH3 domain comprises the second sequence of the pair of sequences; and if the first CH3 domain comprises the second sequence of a pair of sequences, the second CH3 domain comprises the first sequence of the pair of sequences.

[0017] The first or the second Fc region of a TFc may comprise an aa sequence that is at least 70%, 80%, 90%, 95%, 97%, 98%, or 99% identical to an aa sequence of an Fc region provided herein, e.g., selected from the group consisting of SEQ ID NOs:99-166, or differs therefrom in at most 50, 40, 30, 25, 20, 15, 10, 5, 4, 3, 2, or 1 aa deletions, additions or substitutions. The first or the second Fc region comprises an aa sequence selected from the group consisting of SEQ ID NOs:99-166. The first and the second Fc region may comprise an aa sequence that is at least 70%, 80%, 90%, 95%, 97%, 98%, or 99% identical to one aa sequence of a pair of aa sequences selected from the group consisting of SEQ ID NOs:99 and 100; SEQ ID NOs:101 and 102; SEQ ID NOs:103 and 104; SEQ ID NOs:105 and 106; SEQ ID NOs:107 and 108; SEQ ID NOs:109 and 110; SEQ ID NOs:111 and 112; SEQ ID NOs:113 and 114; SEQ ID NOs:115 and 116; SEQ ID NOs:117 and 118; SEQ ID NOs:119 and 120; SEQ ID NOs:121 and 122; SEQ ID NOs:123 and 124; SEQ ID NOs:125 and 126; SEQ ID NOs:127 and 128; SEQ ID NOs:129 and 130; SEQ ID NOs:131 and 132; SEQ ID NOs:133 and 134; SEQ ID NOs:135 and 136; SEQ ID NOs:137 and 138; SEQ ID NOs:139 and 140; SEQ ID NOs:141 and 142; SEQ ID NOs:143 and 144; SEQ ID NOs:145 and 146; SEQ ID NOs:147 and 148; SEQ ID NOs:149 and 150; SEQ ID NOs:151 and 152; SEQ ID NOs:153 and 154; SEQ ID NOs:155 and 156; SEQ ID NOs:157 and 158; SEQ ID NOs:159 and 160; SEQ ID NOs:161 and 162; SEQ ID NOs:163 and 164; and SEQ ID NOs:165 and 166, or which differs therefrom in at most 50, 40, 30, 25, 20, 15, 10, 5, 4, 3, 2, or 1 aa deletions, additions or substitutions, and wherein the first Fc region comprises a different member of the pair than is comprised by the second Fc region. The first Fc region and the second Fc region together may comprise a pair of two different members, each member being an Fc aa sequence, wherein each pair is selected from the group of pairs consisting of SEQ ID NOs:99 and 100; SEQ ID NOs:101 and 102; SEQ ID NOs:103 and 104; SEQ ID NOs:105 and 106; SEQ ID NOs:107 and 108; SEQ ID NOs:109 and 110; SEQ ID NOs:111 and 112; SEQ ID NOs:113 and 114; SEQ ID NOs:115 and 116; SEQ ID NOs:117 and 118; SEQ ID NOs:119 and 120; SEQ ID NOs:121 and 122; SEQ ID NOs:123 and 124; SEQ ID NOs:125 and 126; SEQ ID NOs:127 and 128; SEQ ID NOs:129 and 130; SEQ ID NOs:131 and 132; SEQ ID NOs:133 and 134; SEQ ID NOs:135 and 136; SEQ ID NOs:137 and 138; SEQ ID NOs:139 and 140; SEQ ID NOs:141 and 142; SEQ ID NOs:143 and 144; SEQ ID NOs:145 and 146; SEQ ID NOs:147 and 148; SEQ ID NOs:149 and 150; SEQ ID NOs:151 and 152; SEQ ID NOs:153 and 154; SEQ ID NOs:155 and 156; SEQ ID NOs:157 and 158; SEQ ID NOs:159 and 160; SEQ ID NOs:161 and 162; SEQ ID NOs:163 and 164; and SEQ ID NOs:165 and 166, each member aa sequence being at least 70%, 80%, 90%, 95%, 97%, 98%, or 99% identical to, or differing in at most 50, 40, 30, 25, 20, 15, 10, 5, 4, 3, 2, or 1 aa additions, deletions or substitutions from each sequence of each said pair, wherein the first Fc region comprises a different member of the pair than is comprised by the second Fc region.

[0018] A TFc may comprise an aa sequence that is at least 70%, 80%, 90%, 95%, 97%, 98%, or 99% identical to an aa sequence of a TFc provided herein, e.g., selected from the group consisting of SEQ ID NOs:171, 173, 175, 177, 179, 181, 183, 185, 187, 189, 191, 193, 195, 197, 199, 201, 203, 205, 207, 209, 211, 213, 215, 217, 219 and 221, or which differs therefrom in at most 30, 25, 20, 15, 10, 5, 4, 3, 2, or 1 aa additions, deletions or substitutions. The TFc may comprise an aa sequence selected from the group consisting of SEQ ID NOs:171, 173, 175, 177, 179, 181, 183, 185, 187, 189, 191, 193, 195, 197, 199, 201, 203, 205, 207, 209, 211, 213, 215, 217, 219 and 221.

[0019] A TFcA, e.g., a TFcBA, e.g., an anti-c-Met+anti-EGFR TFcBA or an anti-c-Kit+anti-RON TFcBA or an anti-FGFR2+anti-EPCAM TFcBA, may comprise a heavy chain that comprises in amino to carboxyl terminal order: a first heavy chain variable (VH) domain, a TFc, a connecting linker and a second VH domain. The heavy chain may comprise in amino to carboxyl terminal order: a first VH domain, a CH1 domain, a TFc, a connecting linker and a second VH domain. The heavy chain may comprise in amino to carboxyl terminal order: a first VH domain, a CH1 domain, a TFc, a connecting linker, a second VH domain, an scFv linker and a second light chain variable (VL) domain, wherein the second VH and VL domains associate to form a second binding site. A TFcA may comprise a light chain that comprises a first VL domain that dimerizes with the first VH domain to form a first binding site. The light chain may comprise a light chain constant (CL) domain that is linked to the carboxyl terminus of the VL domain. The first binding site may be an anti-c-Met, anti-c-Kit, anti-ErbB2, anti-ErbB3, anti-ErbB4, anti-IGF1R, anti-IGF2R, anti-Insulin receptor, anti-RON, anti-EGFR, anti-VEGFR1, anti-VEGFR2, anti-TNFR, anti-FGFR1, anti-FGFR2, anti-FGFR3, anti-FGFR4, anti-PDGFR alpha, anti-PDGFR beta, anti-EPCAM or anti-EphA2 binding site and the second binding site may be an anti-c-Met, anti-c-Kit, anti-ErbB2, anti-ErbB3, anti-ErbB4, anti-IGF1R, anti-IGF2R, anti-Insulin receptor, anti-RON, anti-VEGFR1, anti-VEGFR2, anti-TNFR, anti-FGFR1, anti-FGFR2, anti-FGFR3, anti-FGFR4, anti-PDGFR alpha, anti-PDGFR beta, anti-EphA2 or anti-EGFR binding site. If a TFcA is a monovalent TFcA, the binding site may be an anti-c-Met, anti-c-Kit, anti-ErbB2, anti-ErbB3, anti-ErbB4, anti-IGF1R, anti-IGF2R, anti-Insulin receptor, anti-RON, anti-VEGFR1, anti-VEGFR2, anti-TNFR, anti-FGFR1, anti-FGFR2, anti-FGFR3, anti-FGFR4, anti-PDGFR alpha, anti-PDGFR beta, anti-EPCAM, anti-EphA2 or anti-EGFR binding site. An exemplary anti-c-Met binding site may comprise a VH domain comprising either or both of a) the aa sequence of the VH Complementarity Determining Region (CDR)3 (VHCDR3) in SEQ ID NO:223 or 287 and b) a VLCDR3 comprising the aa sequence of the VLCDR3 in SEQ ID NO:231 or 289. Another exemplary the anti-c-Met binding site may comprise a VH domain comprising a set of three VH CDRs comprising VHCDR1, VCDR2 and VHCDR3, wherein VHCDR1, VHCDR2 and VHCDR3 comprise the aa sequence of the VHCDR1, VHCDR2 and VHCDR3 in SEQ ID NO:223 or 231; and a VL domain comprising a set of three VLCDRs comprising VLCDR1, VLCDR2, and VLCDR3, wherein VLCDR1, VLCDR2 and VLCDR3 comprise the aa sequence of the VLCDR1, VLCDR2 and VLCDR3 in SEQ ID NO:287 or 289, respectively. An exemplary anti-EGFR binding site may comprise either or both of a) a VHCDR3 comprising the aa sequence of the VHCDR3 in SEQ ID NO:233, 237, 258, 275, 277 or 279 and b) a VLCDR3 comprising the aa sequence of the VLCDR3 in SEQ ID NO:233, 237, 258, 275, 277 or 279. An exemplary anti-EGFR binding site may comprise a VH domain comprising a set of three VHCDRs comprising VHCDR1, VCDR2 and VHCDR3, wherein VHCDR1, VHCDR2 and VHCDR3 comprise the aa sequence of the VHCDR1, VHCDR2 and VHCDR3 in SEQ ID NO: 233, 237, 258, 275, 277 or 279; and a VL domain comprising a set of three VLCDRs comprising VLCDR1, VLCDR2, and VLCDR3, wherein VLCDR1, VLCDR2 and VLCDR3 comprise the aa sequence of the VLCDR1, VLCDR2 and VLCDR3 in SEQ ID NO:233, 237, 258, 275, 277 or 279. The anti-c-Met, anti-c-Kit, anti-ErbB2, anti-ErbB3, anti-ErbB4, anti-IGF1R, anti-IGF2R, anti-Insulin receptor, anti-RON, anti-VEGFR1, anti-VEGFR2, anti-TNFR, anti-FGFR1, anti-FGFR2, anti-FGFR3, anti-FGFR4, anti-PDGFR alpha, anti-PDGFR beta, anti-EPCAM, anti-EphA2 or anti-EGFR binding site may comprise an N-terminal portion of the heavy chain and an N-terminal portion of the light chain. The anti-EGFR, anti-c-Kit, anti-ErbB2, anti-ErbB3, anti-ErbB4, anti-IGF1R, anti-IGF2R, anti-Insulin receptor, anti-RON, anti-VEGFR1, anti-VEGFR2, anti-TNFR, anti-FGFR1, anti-FGFR2, anti-FGFR3, anti-FGFR4, anti-PDGFR alpha, anti-PDGFR beta, anti-EPCAM, anti-EphA2 or anti-c-Met binding site may be comprised by a C-terminal scFv that is entirely comprised by the heavy chain to form a contiguous polypeptide.

[0020] An anti-c-Met binding site of a TFcA, e.g., a TFcBA, may be comprised by either or both of a VH domain and a VL domain, wherein the VH domain comprises an aa sequence that is at least 70%, 80%, 90%, 95%, 97%, 98%, or 99% identical to the VH domain of an anti-c-Met binding site, e.g., set forth in SEQ ID NOs:223, 231, 287 or 289, or differs therefrom in at most 10, 9, 8, 7, 6, 5, 4, 3, 2, or 1 aas deletions, additions or substitution; and the VL domain comprises an aa sequence that is at least 70%, 80%, 90%, 95%, 97%, 98%, or 99% identical to the VL domain of an anti-c-Met binding site provided herein, e.g., set forth in SEQ ID NOs:223, 231, 287 or 289, or differs therefrom in at most 10, 9, 8, 7, 6, 5, 4, 3, 2, or 1 aas deletions, additions or substitution.

[0021] An anti-EGFR binding site of a TFcA, e.g., a TFcBA, may be comprised by either or both of a VH domain and a VL domain, wherein the VH domain comprises an aa sequence that is at least 70%, 80%, 90%, 95%, 97%, 98%, or 99% identical to the VH domain of an anti-EGFR binding site provided herein, e.g., set forth in SEQ ID NOs: 233, 237, 258, 275, 277 or 279, or differs therefrom in at most 10, 9, 8, 7, 6, 5, 4, 3, 2, or 1 aa(s) deletion(s), addition(s) or substitution(s); and the VL domain comprises an aa sequence that is at least 70%, 80%, 90%, 95%, 97%, 98%, or 99% identical to the VL domain of an anti-EGFR binding site provided herein, e.g., set forth in SEQ ID NOs: 233, 237, 258, 275, 277 or 279, or differs therefrom in at most 10, 9, 8, 7, 6, 5, 4, 3, 2, or 1 aa(s) deletion(s), addition(s) or substitution(s).

[0022] A TFcA or TFcBA may be a charge-complementary paired TFcA or TFcBA, e.g., wherein: a charge-complementary paired TFcA or TFcBA is a TFcA or TFcBA that comprises a pair of charged amino acids comprising an amino acid selected from group A and an amino acid selected from group B (a charge-complementary pair); wherein group A comprises all natural amino acids with a pI of greater than 7 and group B comprises all natural amino acids with a pI of less than 7, or optionally wherein group A comprises His, Lys, and Arg, and group B comprises Asp, Glu, Asn, Phe, Gln, Tyr, Ser, Met, Thr, Ile, Gly, Val, Trp, Leu, Ala, and Pro; and said charge-complementary pair consists of a first amino acid residue and a second amino acid residue, and said charge-complementary pair is a position 297 charge-complementary pair or a position 299 charge-complementary pair, wherein a position 297 charge-complementary pair is a charge-complementary pair with said first amino acid residue located at EU position 297 of said first Fc region and said second amino acid residue located at EU position 297 of said second Fc region, and a position 299 charge-complementary pair is a charge-complementary pair with said first amino acid residue located at EU position 299 of said first Fc region and said second amino acid residue located at EU position 299 of said second Fc region. The charge-complementary paired TFcA or TFcBA may comprise both a position 297 charge-complementary pair and a position 299 charge-complementary pair, wherein the first and second amino acid residues of the position 297 charge-complementary pair are the same as or different from the first and second amino acid residues of the position 299 charge-complementary pair. The charge-complementary paired TFcA or may comprise a position 297 charge-complementary pair and wherein the charge-complementary paired TFcA or TFcBA is more stable than a TFcA or TFcBA that is not a charge-complementary paired TFcA or TFcBA but that is identical to the charge-complementary paired TFcA or TFcBA except that amino acid residues corresponding to the first and the second amino acid residues are both residues consisting of the same charged amino acid, said same charged amino acid being one of the amino acids of the position 297 charge-complementary pair of the charge-complementary paired TFcA or TFcBA. The charge-complementary paired TFcA or TFcBA may comprise a position 299 charge-complementary pair and wherein the charge-complementary paired TFcA or TFcBA is more stable than a TFcA or TFcBA that is not a charge-complementary paired TFcA or TFcBA but that is identical to the charge-complementary paired TFcA or TFcBA except that amino acid residues corresponding to the first and the second amino acid residues are both residues consisting of the same charged amino acid, said same charged amino acid being one of the amino acids of the position 299 charge-complementary pair of the charge-complementary paired TFcA or TFcBA.

[0023] The first or the second binding site of a TFcA or TFcBA may bind specifically to a human receptor protein selected from the group consisting of ErbB2, ErbB3, ErbB4, IGF1R, IGF2R, Insulin receptor, RON, c-Met, EGFR, VEGFR1, VEGFR2, TNFR, FGFR1-4, PDGFR (alpha and beta), c-Kit, EPCAM and EphA2.

[0024] Further provided herein are pharmaceutical compositions comprising a TFcA or TFcBA and a pharmaceutically acceptable carrier. Also provided are nucleic acid molecules, e.g., comprising at least one coding sequence, said at least one coding sequence encoding a heavy chain or a light chain of a TFcA or TFcBA. A nucleic acid molecule may comprise at least two coding sequences, wherein one coding sequence encodes a heavy chain of a TFcA or TFcBA and a second coding sequence encodes a light chain of the TFcBA. Also provided are vectors, e.g., comprising one or more nucleic acid molecules provided herein. Further provided are cells, e.g., host cells or isolated cells, comprising one or more vectors and/or nucleic acid molecules provided herein. A cell may comprise a nucleic acid molecule encoding the heavy chain of a TFcA or TFcBA and a nucleic acid molecule encoding the light chain of the TFcA or TFcBA.

[0025] Also encompassed herein are methods of producing a TFcA or TFcBA comprising culturing a host cell described herein under conditions in which the nucleic acids are expressed, and isolating the TFcA or TFcBA. A method for producing a TFcA or TFcBA may comprise culturing a cell described herein under conditions suitable for the expression of the TFcA or TFcBA.

[0026] Also provided herein are methods of treating a subject having cancer, said method comprising administering to a subject a therapeutically effective amount of a TFcA or TFcBA, nucleic acid molecule, or vector described herein.

### BRIEF DESCRIPTION OF THE DRAWINGS

[0027] FIG. 1A and FIG. 1B: Diagram of an exemplary anti-c-Met/anti-EGFR Tandem Fc Bispecific Antibody (“TFcBA”) (FIG. 1A) and exemplary mutations in each of the domains of the Tandem Fc (“TFc”) (FIG. 1B).

[0028] FIG. 1A: Diagram of an exemplary anti-c-Met/anti-EGFR TFcBA comprising the following three modules in amino to carboxyl terminal order: 1) a first module consisting of an anti-c-Met binding site; 2) a second module consisting of a TFc; and 3) a third module consisting of an anti-EGFR binding site. In the exemplified TFcBA, the first module is an anti-c-Met Fab and the third module is an anti-EGFR scFv. The TFc comprises two Fc regions that are linked through a TFc linker. In the exemplified TFcBA, the first Fc region comprises a full length IgG1/IgG4 hybrid hinge, an IgG4 CH2 domain, and an IgG1 CH3 domain, and the second Fc region comprises the core and lower hinge of IgG4 (but does not comprise an upper hinge), an IgG4 CH2 domain and an IgG1 CH3 domain. In the exemplified TFcBA, the CH3 domain comprises one or more Association Enhancing Modifications (“AEMs”), which enhance the association between two CH3 domains or two Fc regions. TFcBAs may also comprise one or more disulfide bond forming modifications (“DiSs”), which introduce cysteines allowing for the formation of disulfide bonds between two Fc regions.

[0029] FIG. 1B: Diagram of the structure of a TFc showing in amino to carboxyl terminal order: the first hinge, the first CH2 domain, the first CH3 domain, the TFc linker, the second hinge, the second CH2 domain and the second CH3 domain. Exemplary sequences and domain modifications for each of these domains are shown below the diagram. The name of the first or second CH3 modification in each AEM or DiS is indicated in parenthesis after the name of the modification, wherein the first numeral after “AEM” or “DiS” refers to the module number of the AEM or DiS, respectively, and the second numeral refers to the first or the second of the two CH3 domains. For example, “AEM 1.1” is indicated after the substitutions “T366S/L368A/Y407V,” which substitutions are the combination of substitutions in one of the two CH3 domains of a pair of modifications in AEM module 1. A TFc may comprise any combination of each of these domains, with the proviso that when one of the CH3 domain of the TFc comprises one of the two modifications of an AEM and/or DiS, the other CH3 domain comprises the second, i.e., compatible, modification(s) of the AEM and/or DiS. For example, if one CH3 domain of a TFc comprises AEM 1.1, the other CH3 domain comprises AEM 1.2. “C-term. Cys” refers to a modification adding a C-terminal Cysteine to the CH3 domain by substituting the last three aas of the CH3 domain with those shown in the Figure. Aa residue numbers in this Figure and the other Figures are those in an intact antibody heavy chain, according to the EU index in Kabat.

[0030] FIG. 2: Alignment of aa sequences of wild type and variant hinges. A dash “-” at a position represents an aa that is identical to that in the first line of the figure at that position. A) Aa sequences of full length (SEQ ID NOs:4, 18 and 19) or partial (SEQ ID NOs:1, 2, 3, 16, 17, 23 and 263-265) IgG1 hinges that are wild type (SEQ ID NOs:1-4 and 23) or modified (SEQ ID NOs:16-19 and 263-265). B) Aas of full length (SEQ ID NOs:20, 21 and 22) or partial (SEQ ID NOs:1, 13, 14 and 24) IgG1/IgG4 hybrid hinges that are wild type (SEQ ID NOs:1, 13, 14, 20 and 24) or modified (SEQ ID NOs:21 and 22). C) Aa sequences of full length wild type mIgG1 hinge (SEQ ID NO:266) and hybrid mIgG1/mIgG2A hinge (SEQ ID NO:267). D) Aa sequence of a full length, wild type hIgG2 hinge (SEQ ID NO:7) and modified hIgG2 hinges (SEQ ID NOs:268 and 269). E) Aa sequence of a full length wild type hIgA2 hinge (SEQ ID NO:270) and modified hIgA2 hinges (SEQ ID NOs:271-273).

[0031] FIG. 3: Alignment of IgG1 CH3 aa sequences with or without various aa modifications. Each line is the aa sequence of a different CH3 domain. A dash “-” at a position represents an aa that is identical to that in the first line of the figure at that position. The CH3 modifications are organized according to their module, e.g., AEM module 1. Each module is divided into two groups labeled with two numerals: for example, AEM module 1 is divided into the groups “AEM 11” and “AEM 12,” wherein AEM 11 represents the modifications made to one CH3 domain (domain “1”) of module AEM 1 and AEM 12 represents the modifications made to the second CH3 domain (domain “2”) of the module. Each line within a module represents a CH3 domain having the modifications of the module with or without other modifications. The CH3 aa sequences within one module differ from each other, e.g., in the presence or absence of the carboxyl terminal lysine and/or in the presence of the substitutions D356E and L358M.

[0032] FIG. 4: Alignment of exemplary IgG1 Fc regions. Each line is the aa sequence of a different Fc region. A dash “-” at a position represents an aa that is identical to that in the first line of the figure at that position. Each Fc region comprises a hinge (boldface in first sequence), CH2 and CH3 domain (the CH3 domain is underlined in the first sequence). The SEQ ID NOs of the hinge, CH2 and CH3 sequences of each Fc in this Figure are provided in Table 8. The Fcs are organized in pairs, which are separated form other pairs by lines, and wherein each pair represents compatible Fcs, i.e., Fcs that can associate with each other to form an Fc dimer.

[0033] FIG. 5: Alignment of exemplary IgG1/IgG4 hybrid Fc regions. Each line is the aa sequence of a different Fc region. A dash “-” at a position represents an aa that is identical to that in the first line of the figure at that position. Each Fc region comprises a hinge (boldface in the first sequence), CH2 and CH3 domain (the CH3 domain is underlined in the first sequence). The SEQ ID NOs of the hinge, CH2 and CH3 sequences of each Fc in this Figure are provided in Table 9. The Fcs are organized in pairs, which are separated form other pairs by lines, and wherein each pair represents compatible Fcs, i.e., Fcs that can associate with each other to form an Fc dimer.

[0034] FIG. 6: Aa sequences of the following IgG1 TFcs: 23 (SEQ ID NO:171); 23A (SEQ ID NO:173); 23B (SEQ ID NO:175); 23C (SEQ ID NO:177); 23D (SEQ ID NO:179); 23E (SEQ ID NO:181); 23F (SEQ ID NO:183); 23E(35L) (SEQ ID NO:185); 23E(35L Inverted) (SEQ ID NO:187); 23E(30L) (SEQ ID NO:189); 23E(25L) (SEQ ID NO:191); 23I (SEQ ID NO:193); and 23J (SEQ ID NO:195). Each of these sequences consists of the following domains in amino to carboxyl terminal order: a first IgG1 hinge (double underlined), an IgG1 CH2 domain, an IgG1 CH3 domain (underlined), a (G4S)n linker (in italics), a second IgG1 hinge (doubly underlined, and consisting of the core and lower hinges only), a second IgG1 CH2 domain and a second IgG1 CH3 domain (underlined). The aa changes that are specific to each of these molecules are shown in boldface, and are named above the sequence.

[0035] FIG. 7: Aa sequences of the following IgG1/IgG4 hybrid TFcs: 39 (SEQ ID NO:197); 39A (SEQ ID NO:199); 39B (SEQ ID NO:201); 39C (SEQ ID NO:203); 39D (SEQ ID NO:205); 39E (SEQ ID NO:207); 39F (SEQ ID NO:209); 39E(35L) (SEQ ID NO:211); 39 E(35L Inverted) (SEQ ID NO:213); 39E(30L) (SEQ ID NO:215); 39E(25L) (SEQ ID NO:217); 39I (SEQ ID NO:219); 39J (SEQ ID NO:221). Each of these sequences consist of the following domains in amino to carboxyl terminal order: a first IgG1/IgG4 hybrid hinge consisting of the IgG1 upper hinge and IgG4 core and lower hinges (double underlined), an IgG4 CH2 domain, an IgG1 CH3 domain (underlined), a (G4S)n linker (in italics), a second IgG4 hinge (double underlined, and consisting of the core and lower hinges only), a second IgG4 CH2 domain and a second IgG1 CH3 domain (underlined). The IgG1 sequences are in upper case letters and the IgG4 sequences are in lower case letters. The aa changes that are specific to each of these molecules are shown in boldface, and are named above the sequence.

[0036] FIG. 8: Samples of TFcs 23A, 23B, 23D, 23E, 39B and 39G separated on a 4-12% SDS-PAGE gel under A) non reducing or B) reducing conditions. Molecular weights of the proteins (in KDas) of the molecular weight marker (Biorad Precision Plus Marker) of lane 1 are shown on the left of the gel.

[0037] FIG. 9: Aa sequences of heavy chains of the following exemplary anti-c-Met/anti-EGFR TFcBAs: TFcBAs comprising a humanized 5D5 VH domain and an anti-EGFR scFv comprising the aa sequences of the VH and VL domains of A), B), C), D) E), L) and M) panimumumab (SEQ ID NO:235); F) 2224 (SEQ ID NO:239); G) cetuximab H1L1 (SEQ ID NO:260); H) cetuximab H1L2 (SEQ ID NO:281); I) cetuximab H2L1 (SEQ ID NO:283); and J) cetuximab H2L2 (SEQ ID NO:285). K) Aa sequence of the heavy chain of anti-c-Met/anti-EGFR TFcBA comprising the VH domain of anti-c-Met binding site 2 and humanized anti-EGFR cetuximab scFv H1L1. The aas that were introduced into the cetuximab VH domains for humanization purposes are indicated in lower case. The CDRs of the anti-c-Met Fab are underlined with a dotted line. The CH1 domain is underlined with a wavy line. The hinges are double underlined. The TFc linker is in italics. The CH3 domains are underlined. The AEM and DiS modifications in the CH3 domains are in boldface. The scFv linker is in italics and underlined. The connecting linker is in italics and double underlined.

[0038] FIG. 10: Nucleotide sequences encoding the aa sequences set forth in the Figures and in the specification.

[0039] FIG. 11: Nucleotide and aa sequences of TFcs used in Examples 1 and 2. Each of the aa sequences consists of the following domains in amino to carboxyl terminal order: a signal peptide (underlined and boldface), a first IgG1 hinge (double underlined), an IgG1 CH2 domain, an IgG1 CH3 domain (underlined), a TFc linker (in italics), a second IgG1 hinge (doubly underlined, and consisting of the core and lower hinges only), a second IgG1 CH2 domain and a second IgG1 CH3 domain (underlined). IgG1 aas are in upper case and IgG4 aas are in lower case. The aa changes that are specific to each of these molecules, e.g., AEMs and DiSs modifications, are shown in boldface, and are named above the sequence.

[0040] FIG. 12A: Selection of onartuzumab (OTZM) monoclonal cell line: Lane 1=size standards, Lanes 2-12; 2=OTZM line 1, 3=OTZM line 2, 4=OTZM line 3, 5=OTZM line 4, 6=OTZM line 5, 7=OTZM line 6, 8=OTZM line 7, 9=OTZM line 8, 10=OTZM line 9, 11=OTZM line 10, 12=OTZM line 11.

[0041] FIG. 12B: Selection of onartuzumab (OTZM) monoclonal cell line: Lane 1=size standards Lanes 2-9; 2=OTZM line 12, 3=OTZM line 13, 4=OTZM line 14, 5=OTZM line 15, 6=OTZM line 16, 7=OTZM line 17, 8=OTZM line 18, 9=OTZM line 19.

[0042] FIG. 13A: Non-reduced SDS-PAGE of charged glycosylation mutants: Lane 1=size standards, Lanes 2-8; 2=glyco wt, 3=glyco 1, 4=glyco 2, 5=glyco 3, 6=glyco 4, 7=glyco 5, 8=glyco 6.

[0043] FIG. 13B: Reduced SDS-PAGE of charged glycosylation mutants: Lane 1=size standards, Lanes 2-8; 2=glyco wt, 3=glyco 1, 4=glyco 2, 5=glyco 3, 6=glyco 4, 7=glyco 5, 8=glyco 6.

[0044] FIG. 14: Nucleotide and aa sequences of exemplary TFcBAs.

[0045] FIG. 15: A graph showing binding to cMet-Fc and EGFR-his of TFcBAs comprising the 39E glycoform 4 backbone, onartuzumab antibody and either 2224 or panitumumab antibody.

[0046] FIG. 16: A graph showing inhibition of pMet by TFcs comprising onartuzumab antibody and various backbones including 23, 23E, 39, 39E glycoform 4 backbone, and including TFcBAs comprising 39E glycoform 4 backbone and 2224, cetuximab, or panitumumab antibody.

[0047] FIG. 17: Nucleotide and aa sequences of glycosylation mutants of the exemplary TFcBAs set forth in Table 23.

### BRIEF DESCRIPTION OF THE SEQUENCES

[0048] The amino acid (“aa”) sequences referred to herein and listed in the sequence listing are identified below.

[0049] SEQ ID NOs:1, 2 and 3 are the aa sequences of the wild type IgG1 upper, middle (or core) and lower hinge, respectively (see Table 2).

[0050] SEQ ID NO:4 is the aa sequence of the complete wild type IgG1 hinge, consisting of SEQ ID NOs:1, 2 and 3 in a contiguous sequence in amino to carboxyl terminal order (see Table 2).

[0051] SEQ ID NOs:5 and 6 are the aa sequences of the wild type IgG2 upper and lower hinge, respectively (see Table 2). The IgG2 middle hinge is the same as that of IgG1, i.e., SEQ ID NO:2.

[0052] SEQ ID NO:7 is the aa sequence of the complete wild type IgG2 hinge, consisting of SEQ ID NOs:5, 2 and 6 in a contiguous sequence in amino to carboxyl terminal order (see Table 2).

[0053] SEQ ID NOs:8, 9 and 10 are the aa sequences of the wild type IgG3 upper, middle and lower hinge, respectively (see Table 2).

[0054] SEQ ID NO:11 is the aa sequence of the complete wild type IgG3 hinge, consisting of SEQ ID NOs:8, 9 and 10 in a contiguous sequence in amino to carboxyl terminal order (see Table 2).

[0055] SEQ ID NOs:12, 13 and 14 are the aa sequences of the IgG4 upper, middle and lower hinge, respectively (see Table 2).

[0056] SEQ ID NO:15 is the aa sequence of a full length IgG4 hinge, consisting of SEQ ID NOs:12, 13 and 14 in a contiguous sequence in amino to carboxyl terminal order (see Table 2).

[0057] SEQ ID NO:16 is the aa sequence of the IgG1 upper hinge (SEQ ID NO:1) comprising the aa substitutions H224C and T225C (see Table 4 and FIG. 2).

[0058] SEQ ID NO:17 is the aa sequence of the IgG1 upper hinge (SEQ ID NO:1) comprising the aa substitution T223C (see Table 4 and FIG. 2).

[0059] SEQ ID NO:18 is the aa sequence of the full length IgG1 hinge (SEQ ID NO:4) comprising the aa substitutions H224C and T225C (see Table 4 and FIG. 2).

[0060] SEQ ID NO:19 is the aa sequence of the full length IgG1 hinge (SEQ ID NO:4) comprising the aa substitution T223C (see Table 4 and FIG. 2).

[0061] SEQ ID NO:20 is the aa sequence of a full length hybrid IgG1/IgG4 hinge, consisting of the upper hinge of IgG1 (SEQ ID NO:1) and the middle and lower hinges of IgG4 (SEQ ID NOs:13 and 14, respectively; see Table 4 and FIG. 2).

[0062] SEQ ID NO:21 is the aa sequence of a full length hybrid IgG1/IgG4 hinge, consisting of the upper hinge of IgG1 comprising the aa substitutions H224C and T225C (SEQ ID NO:16) and the middle and lower hinges of IgG4 (SEQ ID NOs:13 and 14, respectively; see Table 4 and FIG. 2).

[0063] SEQ ID NO:22 is the aa sequence of a full length hybrid IgG1/IgG4 hinge, consisting of the upper hinge of IgG1 comprising the aa substitution T223C (SEQ ID NO:17) and the middle and lower hinges of IgG4 (SEQ ID NOs:13 and 14, respectively; see Table 4 and FIG. 2).

[0064] SEQ ID NO:23 is the aa sequence of a partial IgG1 hinge comprising the middle and lower IgG1 hinges (SEQ ID NOs:2 and 3), but not the upper hinge (see Table 4 and FIG. 2).

[0065] SEQ ID NO:24 is the aa sequence of a partial IgG4 hinge comprising the middle and lower IgG4 hinges (SEQ ID NOs:13 and 14), but not the upper hinge (see Table 4 and FIG. 2).

[0066] SEQ ID NO:25 is the aa sequence of a full length IgG1 CH2 domain with the aa substitution N297Q reducing glycosylation at aa 297.

[0067] SEQ ID NO:26 is the aa sequence of a full length wild type IgG4 CH2 domain with the aa substitution T299K reducing glycosylation at aa 297.

[0068] SEQ ID NO:27 is the aa sequence of a full length wild type human IgG1 CH3 domain (see Table 6 and FIG. 3).

[0069] SEQ ID NO:28 is the aa sequence of the wild type IgG1 CH3 domain having SEQ ID NO:27, but lacking the C-terminal lysine (see Table 6 and FIG. 3).

[0070] SEQ ID NO:29 is the aa sequence of the IgG1 CH3 domain having SEQ ID NO:27 with the substitutions D356E and L358M (see Table 6 and FIG. 3).

[0071] SEQ ID NO:30 is the aa sequence of the IgG1 CH3 domain having SEQ ID NO:29, lacking the C-terminal lysine (see Table 6 and FIG. 3).

[0072] SEQ ID NO:31 is the aa sequence of the IgG1 CH3 domain having SEQ ID NO:27 with the substitutions T366S, L368A and Y470V, creating a “hole” (Association Enhancing Modification or “AEM” 1.1; see Table 6 and FIG. 3).

[0073] SEQ ID NO:32 is the aa sequence of the IgG1 CH3 domain having SEQ ID NO:31, lacking the C-terminal lysine (see Table 6 and FIG. 3).

[0074] SEQ ID NO:33 is the aa sequence of the IgG1 CH3 domain having SEQ ID NO:29 with the substitutions T3665, L368A and Y470V, creating a “hole” (AEM 1.1; see Table 6 and FIG. 3).

[0075] SEQ ID NO:34 is the aa sequence of the IgG1 CH3 domain having SEQ ID NO:33, lacking the C-terminal lysine (see Table 6 and FIG. 3).

[0076] SEQ ID NO:35 is the aa sequence of the IgG1 CH3 domain having SEQ ID NO:27 with the substitution T366W, creating a “bump” or “knob” (AEM 1.2; see Table 6 and FIG. 3).

[0077] SEQ ID NO:36 is the aa sequence of the IgG1 CH3 domain having SEQ ID NO:35, lacking the C-terminal lysine (see Table 6 and FIG. 3).

[0078] SEQ ID NO:37 is the aa sequence of the IgG1 CH3 domain having SEQ ID NO:29 with the substitution T366W, creating a “bump” or “knob” (AEM 1.2; see Table 6 and FIG. 3).

[0079] SEQ ID NO:38 is the aa sequence of the IgG1 CH3 domain having SEQ ID NO:37, lacking the C-terminal lysine (see Table 6 and FIG. 3).

[0080] SEQ ID NOs:39-98 are the aa sequences of IgG1 CH3 domains comprising one or more AEM and/or Disulfide bond forming (“DiS”) modifications relative to IgG1 CH3 having SEQ ID NO:27, 28, 29 or 30 (see Table 6 and FIG. 3).

[0081] SEQ ID NOs:99-132 are the aa sequences of exemplary IgG1 Fc regions comprising in a contiguous amino to carboxyl terminal order: (a) a hinge selected from the group consisting of an IgG1 hinge, an IgG1 hinge comprising one or more aa substitutions, and a partial IgG1 hinge; (b) an IgG1 CH2 domain with N297Q (SEQ ID NO:25); and (c) an IgG1 CH3 domain selected from the group consisting of SEQ ID NO:29 and SEQ ID NO:29 comprising one or more AEM and/or DiS modifications (FIG. 4). The hinge, CH2 and CH3 domains are covalently linked without intervening sequences. The SEQ ID NOs of each of the domains of SEQ ID NOs:99-132 are set forth in Table 8.

[0082] SEQ ID NOs:133-166 are the aa sequences of exemplary IgG1/IgG4 hybrid Fc regions comprising in a contiguous amino to carboxyl terminal order: (a) a hinge selected from the group consisting of an IgG1/IgG4 hybrid hinge, an IgG1/IgG4 hybrid hinge comprising one or more aa substitutions, and a partial IgG4 hinge; (b) an IgG4 CH2 domain with T299K (SEQ ID NO:26); and (c) an IgG1 CH3 domain selected from the group consisting of SEQ ID NO:29 and SEQ ID NO:29 comprising one or more AEM and/or DiS modifications. The hinge, CH2 and CH3 domains are covalently linked without intervening sequences. The SEQ ID NOs of each of the domains of SEQ ID NOs:133-166 are set forth in Table 9.

[0083] SEQ ID NO:167 is KSCDKT, which is an exemplary modified carboxyl terminal portion of an IgG1 CH3 domain that introduces a cysteine.

[0084] SEQ ID NO:168 is GEC, which is an exemplary modified carboxyl terminal portion of an IgG1 CH3 domain that introduces a cysteine.

[0085] SEQ ID NO:169 is the aa sequence of an exemplary non Gly-Ser TFc linker.

[0086] SEQ ID NOs:170-195 are nucleotide sequences (even numbers) and aa sequences (odd numbers) of exemplary IgG1 TFcs, which are set forth in FIG. 6. The SEQ ID NOs of the domains that constitute each of these IgG1 TFcs is set forth in Table 12.

[0087] SEQ ID NOs:196-221 are nucleotide sequences (even numbers) and aa sequences (odd numbers) of exemplary TFcs comprising hybrid IgG1/IgG4 Fc regions, which are set forth in FIG. 7. The SEQ ID NOs of the domains that constitute each of these hybrid TFcs is set forth in Table 13.

[0088] SEQ ID NOs:222-223 are the nucleotide and aa sequences, respectively, of the heavy chain Fab domain of anti-c-Met Ab 5D5, without signal peptide.

[0089] SEQ ID NOs:224-225 are the nucleotide and aa sequences, respectively, of the heavy chain of an IgG1 TFcBA comprising the anti-c-Met 5D5 VH domain, an IgG1 TFc (with AEM 1), and the panitumumab scFv (FIG. 9).

[0090] SEQ ID NOs:226-227 are the nucleotide and aa sequences, respectively, of the heavy chain of an IgG1/IgG4 hybrid TFcBA comprising the anti-c-Met 5D5 VH domain, an IgG1/IgG4 hybrid TFc (with AEM 1), and the panitumumab scFv (FIG. 9).

[0091] SEQ ID NOs:228-229 are the nucleotide and aa sequences, respectively, of the heavy chain of an IgG1/IgG4 hybrid TFcBA comprising the anti-c-Met 5D5 VH domain, an IgG1/IgG4 hybrid TFc (with AEM 1), and the panitumumab scFv (FIG. 9).

[0092] SEQ ID NOs:230 and 231 are the nucleotide and aa sequences, respectively, of a light chain comprising humanized 5D5 anti-c-Met VL domain and CL domain, for use, e.g., with a heavy chain comprising the humanized 5D5 anti-c-Met VH domain, e.g., a heavy chain comprising SEQ ID NO: 225, 227, 229, 244, or 343.

[0093] SEQ ID NOs:232 and 233 are the nucleotide and aa sequences of an anti-EGFR scFv comprising the variable regions of panitumumab (VECTIBIX).

[0094] SEQ ID NOs:234 and 235 are the nucleotide and aa sequences, respectively, shown in FIGS. 9 and 10, respectively, of the heavy chain of an anti-c-Met/anti-EGFR TFcBA comprising (a) the anti-c-Met variable domain from humanized 5D5; (b) a TFc with AEM 1 and DiS 2 (SEQ ID NO:181); and (c) an anti-EGFR scFv comprising the variable regions of panitumumab (VECTIBIX) (SEQ ID NO:233).

[0095] SEQ ID NOs:236 and 237 are the nucleotide and aa sequences, respectively, of an anti-EGFR scFv comprising the variable regions of Ab 2224.

[0096] SEQ ID NOs:238 and 239 are the nucleotide and aa sequences, shown in FIGS. 9 and 10, respectively, of the heavy chain of an anti-c-Met/anti-EGFR TFcBA comprising (a) the anti-c-Met variable domain from humanized 5D5; (b) a TFc with AEM 1 and DiS 2 (SEQ ID NO:181); and (c) an anti-EGFR scFv comprising the variable regions of Ab 2224 (SEQ ID NO:237).

[0097] SEQ ID NOs:240 and 241 are the nucleotide and aa sequences, respectively, of an exemplary signal peptide.

[0098] SEQ ID NOs:242 and 243 are the nucleotide and aa sequence, respectively, of an exemplary signal peptide.

[0099] SEQ ID NOs:244 and 245 are the nucleotide and aa sequences, respectively, of the anti-c-Met VH domain of 5D5 and CL domain with a signal peptide having SEQ ID NO:241.

[0100] SEQ ID NO:246 and 247 are the nucleotide and aa sequences of the light chain having SEQ ID NO:231 with a signal peptide having SEQ ID NO:243.

[0101] SEQ ID NOs:248-254 are the aa sequences of variant hinges described in the specification.

[0102] SEQ ID NO: 255 and 256 are the nucleotide and aa sequences, respectively, of the heavy chain Fab region of the anti-c-Met binding site 2 (SEQ ID NO:287) with the signal peptide consisting of SEQ ID NO:241 and shown in Example 3.

[0103] SEQ ID NOs:257 and 258 are the nucleotide and aa sequences, respectively, of an anti-EGFR scFv comprising the variable regions of humanized cetuximab (ERBITUX) H1L1.

[0104] SEQ ID NOs:259 and 260 are the nucleotide and aa sequences, shown in FIGS. 9 and 10, respectively, of the heavy chain of an anti-c-Met/anti-EGFR TFcBA comprising (a) the anti-c-Met variable domain from humanized 5D5; (b) a TFc with AEM 1 and DiS 2 (SEQ ID NO:181); and (c) an anti-EGFR scFv comprising the variable regions of humanized cetuximab (ERBITUX) H1L1 (SEQ ID NO:258).

[0105] SEQ ID NO:261 is the aa sequence of a full length wild type IgG1 CH2 domain.

[0106] SEQ ID NO:262 is the aa sequence of a full length wild type IgG4 CH2 domain. SEQ ID NOs:263, 264 and 265 are aa sequences of variant hIgG1 hinges (FIG. 2).

[0107] SEQ ID NO:266 is the aa sequence of the wild type mouse IgG1 hinge (FIG. 2).

[0108] SEQ ID NO:267 is the aa sequence of a mouse IgG1/IgG2A hybrid hinge (FIG. 2).

[0109] SEQ ID NOs:268 and 269 are the aa sequences of variant hIgG2 hinges (FIG. 2).

[0110] SEQ ID NO:270 is the aa sequence of a wild type hIgA2 hinge (FIG. 2).

[0111] SEQ ID NOs:271-273 are aa sequences of variant hIgA2 hinges (FIG. 2).

[0112] SEQ ID NOs:274-279 are nucleotide (even numbers) and aa (odd numbers) sequences of scFvs comprising variable domains of humanized cetuximab Abs H1L2, H2L1 and H2L2, which are described in Example 3.

[0113] SEQ ID NOs:280-285 are nucleotide (even numbers) and aa (odd numbers) sequences of the heavy chain of an anti-c-Met/anti-EGFR TFcBA comprising (a) the anti-c-Met variable domain from humanized 5D5; (b) an anti-EGFR scFv comprising the variable regions of humanized cetuximab (ERBITUX) Abs H1L2, H2L1 and H2L2 (SEQ ID NO:275, 277 or 279, respectively); and (c) a TFc with AEM 1 and DiS 2 (SEQ ID NO:181) (FIG. 9).

[0114] SEQ ID NOs:286 and 287 are the nucleotide and aa sequences, respectively, of the heavy chain Fab domain of anti-c-Met binding site 2, which is described in Example 3.

[0115] SEQ ID NOs:288 and 289 are the nucleotide and aa sequences, respectively, of the light chain Fab domain of anti-c-Met binding site 2, which is described in Example 3.

[0116] SEQ ID NOs:290 and 291 are the nucleotide and aa sequences, shown in FIGS. 9 and 10, respectively, of the heavy chain of an anti-c-Met/anti-EGFR TFcBA comprising (a) the anti-c-Met heavy chain Fab domain from anti-c-Met binding site 2 (SEQ ID NO:287); (b) a TFc with AEM 1 and DiS 2 (SEQ ID NO:181); and (c) an anti-EGFR scFv comprising the variable regions of humanized cetuximab (ERBITUX) H1L1 (SEQ ID NO:258) (FIG. 9). The aa sequence of SEQ ID NO:291 is the same as that having SEQ ID NO:260, wherein the anti-c-Met binding domain has been replaced with that of the anti-c-Met binding site 2.

[0117] SEQ ID NOs: 292-341 are nucleotide (even numbers) and aa (odd numbers) sequences of TFcs used in Examples 1 and 2 and shown in FIG. 11.

[0118] SEQ ID NOs: 342 and 343 are the nucleotide and aa sequences, respectively, of the heavy chain of an IgG1 TFcBA comprising the anti-c-Met 5D5 VH domain, an IgG1 TFc (with AEM 1 and DiS inverted), and the panitumumab scFv (FIG. 9).

[0119] SEQ ID NO: 344 and 345 are the nucleotide and aa sequences, respectively, of the light chain Fab region of the anti-c-Met binding site 2 (SEQ ID NO:289) with the signal peptide consisting of SEQ ID NO:243 and shown in Example 3.

[0120] SEQ ID NOs: 346 and 347 are the nucleotide and aa sequences, respectively, of the heavy chain of anti-c-met/anti-EGFR TFcBA with humanized 5D5 anti-c-Met and anti-EGFR panitumumab scFv with IgG1 TFc (with AEM 1 and a 40aa TFc linker having SEQ ID NO:169; FIG. 9).

[0121] SEQ ID NOs: 348 and 349 are the nucleotide and aa sequences, respectively, of the heavy chain of anti-c-met/anti-EGFR TFcBA with humanized 5D5 anti-c-Met and anti-EGFR panitumumab scFv with IgG1/IgG4 hybrid TFc (with AEM 1 and a 40aa TFc linker having SEQ ID NO:169; FIG. 9).

[0122] SEQ ID NO: 350 is the aa sequence of the heavy chain of anti-RON/anti-EGFR TFcBA comprising an anti-RON heavy chain Fab domain, anti-EGFR scFv 2224, and TFc 23E (SEQ ID NO:303); FIG. 14.

[0123] SEQ ID NO: 351 is the aa sequence of the heavy chain of the anti-RON/anti-EGFR TFcBA comprising an anti-RON heavy chain Fab domain, anti-EGFR scFv 2224, and TFc 39Egy4 (39E glycoform 4) (SEQ ID NO: 394); FIG. 14.

[0124] SEQ ID NO: 352 is the aa sequence of the heavy chain of the anti-RON/anti-CEA TFcBA comprising an anti-RON heavy chain Fab domain, anti-CEA scFv, and Tfc 23E (SEQ ID NO: 303); FIG. 14.

[0125] SEQ ID NO: 353 is the aa sequence of the heavy chain of the anti-RON/anti-CEA TFcBA comprising an anti-RON heavy chain Fab domain, anti-CEA scFv, and TFc 39Egy4 (SEQ ID NO: 394:); FIG. 14.

[0126] SEQ ID NO: 354 is the aa sequence of the heavy chain of the anti-CEA/anti-cMet TFcBA comprising an anti-CEA heavy chain Fab domain, anti-cMet scFv, and TFc 23E (SEQ ID NO: 303); FIG. 14.

[0127] SEQ ID NO: 355 is the aa sequence of the heavy chain of the anti-CEA/anti-RON TFcBA comprising an anti-CEA heavy chain Fab domain, anti-RON scFv, and TFc 23E (SEQ ID NO: 303); FIG. 14.

[0128] SEQ ID NO: 356 is the aa sequence of the heavy chain of the anti-CEA/anti-scMet TFcBA comprising an anti-CEA heavy chain Fab domain, anti-cMet scFv, and TFc 39Egy4 (SEQ ID NO: 394); FIG. 14.

[0129] SEQ ID NOs 357-358 are the aa sequence and nucleotide sequence of TFc wild-type CH2 sequence; and T366S/L368A/Y407V/CH3 C-terminal Cysteine KSCDKT::T366W/CH3 C-terminal Cysteine GEC in the CH3 domains; FIG. 17.

[0130] SEQ ID NO: 359 is the aa sequence of the heavy chain of the anti-cMet/anti-CEA TFcBA comprising an anti-cMet heavy chain Fab domain, anti-CEA scFv, and TFc 23E (SEQ ID NO: 303); FIG. 14.

[0131] SEQ ID NO: 360 is the aa sequence of the heavy chain of the anti-cMet/anti-CEA TFcBA comprising an anti-cMet heavy chain Fab domain, anti-CEA scFv, and TFc 39Egy4 (SEQ ID NO: 394); FIG. 14.

[0132] SEQ ID NO: 361 is the aa sequence of the heavy chain of the anti-cMet/anti-CEA CD44 comprising an anti-cMet heavy chain Fab, an anti-CD44 scFv, and TFc 39Egy4 (SEQ ID NO: 394); FIG. 14.

[0133] SEQ ID NO: 362 is the aa sequence of the heavy chain of the anti-cMet/anti-CEA CD44 comprising an anti-cMet heavy chain Fab domain, an anti-CD44 scFv, and TFc 23E (SEQ ID NO: 303); FIG. 14.

[0134] SEQ ID NO: 363 is the aa sequence of the heavy chain of the anti-cMet/anti-CEA CD44 comprising an anti-cMet heavy chain Fab domain, an anti-CD44 scFv, and TFc 23E (SEQ ID NO: 303); FIG. 14.

[0135] SEQ ID NO: 364 is the aa sequence of the heavy chain of the anti-cMet/anti-CEA CD44 comprising an anti-cMet heavy chain Fab domain, an anti-CD44 scFv, and TFc 39Egy4 (SEQ ID NO: 394), FIG. 14.

[0136] SEQ ID NO: 365 is the aa sequence of the heavy chain of the anti-CD44/anti-anti-cMet comprising an anti-CD44 heavy chain Fab domain, an anti-cMet scFv, and TFc 23E (SEQ ID NO: 303); FIG. 14.

[0137] SEQ ID NO: 366 is the aa sequence of the heavy chain of the anti-CD44/anti-cMet comprising an anti-CD44 heavy chain Fab domain, an anti-cMet scFv, and TFc 39Egy4 (SEQ ID NO: 394); FIG. 14.

[0138] SEQ ID NO: 367 is the aa sequence of the anti-CD44 ARH60-16-2 light chain.

[0139] SEQ ID NOs 368-369 are the aa sequence and nucleotide sequence of the anti-cMet antibody onartuzumab and TFc 23 light chain; FIG. 14.

[0140] SEQ ID NOs 370-371 are the aa sequence and nucleotide sequence of the anti-cMet antibody onartuzumab and TFc 39 heavy chain; FIG. 14.

[0141] SEQ ID NOs 372-373 are the aa sequence and nucleotide sequence of the anti-cMet antibody onartuzumab and TFc 23E heavy chain; FIG. 14.

[0142] SEQ ID NOs 374-375 are the aa sequence and nucleotide sequence of the anti-cMet antibody onartuzumab and TFc 39Egy4 heavy chain; FIG. 14.

[0143] SEQ ID NOs 376-377 are the aa sequence and nucleotide sequence of anti-cMet/anti-EGFR comprising an anti-cMet heavy chain Fab domain, the cetuximab anti-EGFR scFv, and TFc 23E (SEQ ID NO: 303); FIG. 14.

[0144] SEQ ID NOs 378-379 are the aa sequence and nucleotide sequence of anti-cMet/anti-EGFR comprising an anti-cMet heavy chain Fab domain, the panitumumab anti-EGFR scFv, and TFc 23E (SEQ ID NO: 303); FIG. 14.

[0145] SEQ ID NOs 380-381 are the aa sequence and nucleotide sequence of anti-cMet/anti-EGFR comprising an anti-cMet heavy chain Fab domain, the 2224 anti-EGFR scFv, and TFc 23E (SEQ ID NO: 303); FIG. 14.

[0146] SEQ ID NOs 382-383 are the aa sequence and nucleotide sequence of anti-cMet/anti-EGFR comprising an anti-cMet heavy chain Fab domain the cetuximab anti-EGFR scFv, and TFc 39Egy4 (SEQ ID NO: 394); FIG. 14.

[0147] SEQ ID NOs 384-385 are the aa sequence and nucleotide sequence of anti-cMet/anti-EGFR comprising an anti-cMet heavy chain Fab domain, the panitumumab anti-EGFR scFv, and TFc 39Egy4 (SEQ ID NO: 394); FIG. 14.

[0148] SEQ ID NOs 386-387 are the aa sequence and nucleotide sequence of anti-cMet/anti-EGFR comprising an anti-cMet heavy chain Fab domain, the 2224 anti-EGFR scFv, and TFc 39Egy4 (SEQ ID NO: 394); FIG. 14.

[0149] For the sequences disclosed in FIG. 17, the double underline is the hinge, the single underline is the CH3 domain, the second double underline is the second hinge, the second underline is the second CH3.

[0150] SEQ ID NOs 388-389 are the aa sequence and nucleotide sequence of glycosylation mutant 1, comprising N297D/T299S::N297D/T299S amino acid changes in the CH2 domains (underlined, bold-face), and T366S/L368A/Y407V/CH3 C-terminal Cysteine KSCDKT::T366W/CH3 C-terminal Cysteine GEC in the CH3 domains; FIG. 17 SEQ ID NOs 390-391 are the aa sequence and nucleotide sequence of glycosylation mutant 2, comprising T299K::N297D/T299S amino acid changes in the CH2 domains (underlined, bold-face), and T366S/L368A/Y407V/CH3 C-terminal Cysteine KSCDKT::T366W/CH3 C-terminal Cysteine GEC in the CH3 domains; FIG. 17.

[0151] SEQ ID NOs 392-393 are the aa sequence and nucleotide sequence of glycosylation mutant 3, comprising N297D/T299S::T299K amino acid changes in the CH2 domains (underlined, bold-face), and T366S/L368A/Y407V/CH3 C-terminal Cysteine KSCDKT::T366W/CH3 C-terminal Cysteine GEC in the CH3 domains; FIG. 17.

[0152] SEQ ID NOs 394-395 are the aa sequence and nucleotide sequence of glycosylation mutant 4, comprising T299K::T299D amino acid changes in the CH2 domains (underlined, bold-face), and T366S/L368A/Y407V/CH3 C-terminal Cysteine KSCDKT::T366W/CH3 C-terminal Cysteine GEC in the CH3 domains; FIG. 17.

[0153] SEQ ID NOs 396-397 are the aa sequence and nucleotide sequence of glycosylation mutant 5, comprising T299D::T299K amino acid changes in the CH2 domains (underlined, bold-face), and T366S/L368A/Y407V/CH3 C-terminal Cysteine KSCDKT::T366W/CH3 C-terminal Cysteine GEC in the CH3 domains; FIG. 17.

[0154] SEQ ID NOs 398-399 are the aa sequence and nucleotide sequence of glycosylation mutant 6, comprising T299D::T299D amino acid changes in the CH2 domains (underlined, bold-face), and T366S/L368A/Y407V/CH3 C-terminal Cysteine KSCDKT::T366W/CH3 C-terminal Cysteine GEC in the CH3 domains; FIG. 17.

### DETAILED DESCRIPTION

[0155] Provided herein are Tandem Fc Antibodies (“TFcAs”), e.g., Tandem Fc Bispecific

[0156] Antibodies (“TFcBAs”). The molecules may be used for treating a cell proliferative disorder, e.g., a cancer.

### DEFINITIONS

[0157] For convenience, the meaning of certain terms and phrases used in the specification, examples, and appended claims, are provided below.

[0158] “Aa modification” or “aa change” refers to one or more amino acid (aa) deletion, addition or substitution to an aa sequence. Aa sequence insertions include amino- and/or carboxyl-terminal fusions ranging in length from one residue to polypeptides containing a hundred or more residues, as well as intrasequence insertions of single or multiple aa residues. Intrasequence insertions may range generally from about 1 to 10 residues, e.g., 1 to 5, e.g., 1 to 3.

[0159] “AEM” or “association enhancing modification” refers to an aa modification made to a CH3 domain to enhance its association with another CH3 domain. An AEM may comprise one or more aa substitutions, deletions or additions in one or both Fcs of a TFc. AEMs are classified in modules, e.g., module 1 (“AEM 1”), wherein the modification to one of the two CH3 domains is referred to as AEM 1.1 and the modification to the other CH3 domain is referred to as AEM 1.2. For example, AEM 1.1 consists of the combination of substitutions T366S/L368A and Y407V and AEM 1.2 consists of the aa substitution T366W. When a CH3 domain comprises two or more aa modifications, e.g., aa substitutions, the modifications are separated from each other by a “/”. When referring to modifications in two CH3 domains, the modifications in each of the CH3 domains are separated by “::”.

[0160] “Amino acid substitution” refers to the replacement of one specific amino acid (“aa”) in a protein with another aa. A substitution may be a conservative substitution, as defined below. An “anti-c-Met binding site” refers to a binding site that binds specifically to human c-Met. An “anti-EGFR binding site” refers to a binding site that binds specifically to human EGFR.

[0161] “Antigen binding site” refers to a binding site that comprises the VH and/or VL domain of an antibody, or at least one CDR thereof, provided that the antigen binding site binds specifically to its target antigen. For example, an antigen binding site may comprise, consist essentially of, or consist of a VHCDR3 alone or together with a VHCDR2 and optionally a VHCDR1. In certain embodiments, an antigen binding site comprises a VH domain and a VL domain, which may be present on the same polypeptide or on two different polypeptides, e.g., the VH domain is present on a heavy chain and a VL domain is present on a light chain.

[0162] “Antigen-binding portion” of an antibody refers to one or more fragments of an antibody that retain the ability to specifically bind to an antigen (e.g., c-met or EGFR). It has been shown that the antigen-binding function of an antibody can be retained by fragments of a full-length antibody. Examples of binding fragments encompassed within the term “antigen-binding portion” of an antibody include (i) a Fab fragment, a monovalent fragment consisting of the VL, VH, CL and CH1 domains; (ii) a F(ab′)₂ fragment, a bivalent fragment comprising two Fab fragments linked by a disulfide bridge at the hinge region; (iii) an Fd fragment consisting of the VH and CH1 domains; (iv) an Fv fragment consisting of the VL and VH domains of a single arm of an antibody, (v) a dAb fragment which consists of a VH domain; and (vi) an isolated Complementarity Determining Region (“CDR”). Furthermore, although VL and VH are two domains of an Fv fragment, VL and VH are coded for by separate genes, they can be joined, using recombinant methods, by a synthetic linker that enables them to be made as a single protein chain in which the VL and VH regions pair to form monovalent proteins, known as single chain Fvs (scFvs) (see, e.g., U.S. Pat. No. 5,892,019). Such single chain antibodies are also intended to be encompassed within the term “antigen-binding portion” of an antibody. Other forms of single chain antibodies, such as diabodies are also encompassed. Diabodies are bivalent, bispecific antibodies in which VH and VL domains are expressed on a single polypeptide chain, but using a linker that is too short to allow for pairing between the two domains on the same chain, thereby forcing the domains to pair with complementary domains of another chain and creating two antigen binding sites.

[0163] “Binding affinity” refers to the strength of a binding interaction and includes both the actual binding affinity as well as the apparent binding affinity. The actual binding affinity is a ratio of the association rate over the disassociation rate. The apparent affinity can include, for example, the avidity resulting from a polyvalent interaction. Dissociation constant (Kd), is typically the reciprocal of the binding affinity, and may be conveniently measured using a surface plasmon resonance assay (e.g., as determined in a BIACORE 3000 instrument (GE Healthcare) e.g., using recombinant EGFR as the analyte and an anti-EGFR antibody as the ligand) or a cell binding assay, each of which assays is described in Example 3 of U.S. Pat. No. 7,846,440.

[0164] “Binding moiety,” “binding domain,” or “binding site,” refers to the portion, region, or site of a binding polypeptide or, when so specified, of a heavy or light chain thereof, that is directly involved in mediating the specific binding of an antibody to a target molecule (i.e., an antigen). Exemplary binding domains include an antigen binding site, a receptor binding domain of a ligand, a ligand binding domain of a receptor or an enzymatic domain. In preferred embodiments, the binding domain comprises or consists of an antigen binding site (e.g., comprising a variable heavy (VH) chain sequence and variable light (VL) chain sequence or six CDRs from an antibody placed into alternative framework regions (e.g., human framework regions optionally comprising one or more aa substitutions). In certain embodiments, a binding site may be comprised essentially only of a VH or a VL chain sequence. A binding site may be entirely from one species, e.g., it has only sequences that derive from the germline sequences of one species. For example, a binding site may be human (i.e., from the human species), mouse, or rat. A binding site may also be humanized, i.e., the CDRs are from one species and the frameworks (FRs) are from another species. For example, a binding site may have CDRs that were derived from a mouse antibody and FRs that are from the human species. Certain humanized binding sites comprise mutations in one or more CDR to make the CDRs look more like the CDRs of the donor antibody. Certain humanized antibodies may also comprise mutations in one or more FR. Generally mutations in a binding site may enhance the affinity of binding of the binding site to its target antigen, and/or they may stabilize the binding site, e.g., to extend its half-life.

[0165] “CDR” or “complementarity determining region” refers to the noncontiguous antigen combining sites found within the variable region of both heavy and light chain polypeptides. These particular regions have been described by Kabat et al., J. Biol. Chem. 252, 6609-6616 (1977) and Kabat et al., Sequences of protein of immunological interest. (1991), and by Chothia et al., J. Mol. Biol. 196:901-917 (1987) and by MacCallum et al., J. Mol. Biol. 262:732-745 (1996) where the definitions include overlapping or subsets of aa residues when compared against each other. The aa residues which encompass the CDRs as defined by each of the above cited references are set forth for comparison. As used herein, and if not otherwise specified, “CDR” is as defined by Kabat.

TABLE 1
CDR definitions

| | CDR Definitions | | |
|---|---|---|---|
| | Kabat¹ | Chothia² | MacCallum³ |
| VHCDR1 | 31-35 | 26-32 | 30-35 |
| VHCDR2 | 50-65 | 53-55 | 47-58 |
| VHCDR3 | 95-102 | 96-101 | 93-101 |
| VLCDR1 | 24-34 | 26-32 | 30-36 |
| VLCDR2 | 50-56 | 50-52 | 46-55 |
| VLCDR3 | 89-97 | 91-96 | 89-96 |

¹Residue numbering follows the nomenclature of Kabat et al., 1991,supra
²Residue numbering follows the nomenclature of Chothia et al., supra
³Residue numbering follows the nomenclature of MacCallum et al., supra

[0166] “CH1 domain” refers to the heavy chain immunoglobulin constant domain located between the VH domain and the hinge. It spans EU positions 118-215. A CH1 domain may be a naturally occurring CH1 domain, or a naturally occurring CH1 domain in which one or more amino acids (“aas”) have been substituted, added or deleted, provided that the CH1 domain has the desired biological properties. A desired biological activity may be a natural biological activity, an enhanced biological activity or a reduced biological activity relative to the naturally occurring sequence.

[0167] “CH2 domain” refers to the heavy chain immunoglobulin constant domain that is located between the hinge and the CH3 domain. As defined here, it spans EU positions 237-340. A CH2 domain may be a naturally occurring CH2 domain, or a naturally occurring CH2 domain in which one or more aas have been substituted, added or deleted, provided that the CH2 domain has the desired biological properties. A desired biological activity may be a natural biological activity, an enhanced biological activity or a reduced biological activity relative to that of the naturally occurring domain.

[0168] “CH3 domain” refers to the heavy chain immunoglobulin constant domain that is located C-terminally of the CH2 domain and spans approximately 110 residues from the N-terminus of the CH2 domain, e.g., about positions 341-446b (EU numbering system). A CH3 domain may be a naturally occurring CH3 domain, or a naturally occurring CH3 domain in which one or more aas have been substituted, added or deleted, provided that the CH3 domain has the desired biological properties. A desired biological activity may be a natural biological activity, an enhanced biological activity or a reduced biological activity relative to that of the naturally occurring domain. A CH3 domain may or may not comprise a C-terminal lysine. “CH4 domain” refers to the heavy chain immunoglobulin constant domain that is located C-terminally of the CH3 domain in IgM and IgE antibodies. A CH4 domain may be a naturally occurring CH4 domain, or a naturally occurring CH4 domain in which one or more aas have been substituted, added or deleted, provided that the CH4 domain has the desired biological properties. A desired biological activity may be a natural biological activity, an enhanced biological activity or a reduced biological activity relative to that of the naturally occurring domain.

[0169] “CL domain” refers to the light chain immunoglobulin constant domain that is located C-terminally to the VL domain. It spans about Kabat positions 107A-216. A CL domain may be a naturally occurring CL domain, or a naturally occurring CL domain in which one or more aas have been substituted, added or deleted, provided that the CL domain has the desired biological properties. A desired biological activity may be a natural biological activity, an enhanced biological activity or a reduced biological activity relative to that of the naturally occurring domain. A CL domain may or may not comprise a C-terminal lysine.

[0170] “c-Met” or “c-MET” refers to Mesenchymal-Epithelial Transition (MET) factor, which is also known as Hepatocyte Growth Factor Receptor (HGFR), Scatter Factor (SF) receptor, AUTS9, RCCP2, corresponds to Gene ID 4233, and has tyrosine-kinase activity. The primary single chain precursor protein is post-translationally cleaved to produce the alpha and beta subunits, which are disulfide linked to form the mature receptor. Two transcript variants encoding different isoforms have been found for this gene. HGF is the only known ligand for c-Met. The aa sequence of the human c-Met isoform a precursor is provided at Genbank Accession No. NP_{—}001120972.1 and isoform b precursor is provided at Genbank Accession No. NP_{—}000236.2.

[0171] “Conservative substitution” or “conservative amino acid substitution” refers to the replacement of one or more aa residues in a protein or a peptide with, for each particular pre-substitution aa residue, a specific replacement aa that is known to be unlikely to alter either the confirmation or the function of a protein or peptide in which such a particular aa residue is substituted for by such a specific replacement aa. Such conservative substitutions typically involve replacing one aa with another that is similar in charge and/or size to the first aa, and include replacing any of isoleucine (I), valine (V), or leucine (L) for each other, substituting aspartic acid (D) for glutamic acid (E) and vice versa; glutamine (Q) for asparagine (N) and vice versa; and serine (S) for threonine (T) and vice versa. Other substitutions are known in the art to be conservative in particular sequence or structural environments. For example, glycine (G) and alanine (A) can frequently be substituted for each other to yield a conservative substitution, as can be alanine and valine (V). Methionine (M), which is relatively hydrophobic, can frequently conservatively substitute for or be conservatively substituted by leucine or isoleucine, and sometimes valine. Lysine (K) and arginine (R) are frequently interchangeable in locations in which the significant feature of the aa residue is its charge and the differing pK's of these two basic aa residues are not expected to be significant. The effects of such substitutions can be calculated using substitution score matrices such PAM120, PAM-200, and PAM-250. Other such conservative substitutions, for example, substitutions of entire regions having similar hydrophobicity characteristics (e.g., transmembrane domains), are well known.

[0172] A “constant region” or domain of a light chain of an immunoglobulin is referred to interchangeably as a “CL,” “light chain constant region domain,” “CL region” or “CL domain.” A constant domain on a heavy chain (e.g. hinge, CH1, CH2 or CH3 domains) of an immunoglobulin is referred to interchangeably as a “CH,” “heavy chain constant domain,” “CH” region or “CH domain.” A variable domain on an immunoglobulin light chain is referred to interchangeably as a “VL,” “light chain variable domain,” “VL region” or “VL domain.” A variable domain on an immunoglobulin heavy chain is referred to interchangeably as a “VH,” “heavy chain variable domain,” “VH region” or “VH domain.”

[0173] “DiS” refers to the modification of a domain, e.g., a hinge or CH3 domain, that results in the addition of a Cysteine, which can form a disulfide bond with another Cysteine. A DiS may comprise one or more aa substitutions, deletions or additions in one or both Fcs of a TFc. DiSs are classified in modules, e.g., module 1 (“DiS 1”), wherein the modification to one of the two Fcs is referred to as DiS 1.1 and the modification to the other Fc is referred to as DiS 1.2. For example, DiS 1.1 consists of the substitution Y349C and DiS 1.2 consists of the aa substitution S354C.

[0174] “Domain” refers generally to a region, e.g., an independently folding, globular region or a non-globular region (e.g., a linker domain), of a heavy or light chain polypeptide which may comprise peptide loops (e.g., 1 to 4 peptide loops) that may be stabilized, for example, by a β-pleated sheet and/or an intrachain disulfide bond. The constant and variable regions of immunoglobulin heavy and light chains are typically folded into domains. In particular, each one of the CH₁, CH2, CH3, CH4, CL, VH and VL domains typically form a loop structure.

[0175] “EC₅₀” or “EC50” refers to the concentration of a molecule, e.g., a TFcA, that provides 50% of the maximal effect of the protein on a particular system such as a binding assay or a signal transduction pathway.

[0176] “EGFR” refers to Epidermal Growth Factor Receptor, which is also known as ErbB1, HER-1, mENA, and PIG61. EGFR is known to bind ligands including epidermal growth factor (EGF), transforming growth factor α (TGf-α), amphiregulin, heparin-binding EGF (hb-EGF), betacellulin, epiregulin and has Gene ID 1956 (Herbst, R. S., and Shin, D. M., Cancer 94 (2002) 1593-1611; Mendelsohn, J., and Baselga, J., Oncogene 19 (2000) 6550-6565). EGFR is transmembrane glycoprotein that is a member of the protein kinase superfamily that regulates numerous cellular processes via tyrosine-kinase mediated signal transduction pathways, including, but not limited to, activation of signal transduction pathways that control cell proliferation, differentiation, cell survival, apoptosis, angiogenesis, mitogenesis, and metastasis (Atalay, G., et al., Ann. Oncology 14 (2003) 1346-1363; Tsao, A. S., and Herbst, R. S., Signal 4 (2003) 4-9; Herbst, R. S., and Shin, D. M., Cancer 94 (2002) 1593-1611; Modjtahedi, H., et al., Br. J. Cancer 73 (1996) 228-235). Binding of the ligand to EGFR induces receptor dimerization and tyrosine autophosphorylation, which leads to cell proliferation. Multiple alternatively spliced transcript variants that encode different protein isoforms have been found for this gene. The aa sequences for human EGFR isoforms a-d precursors are provided at Genbank Accession Nos. NP_{—}005219.2, NP_{—958439.1}, NP_{—}958440.1 and NP_{—}958441.1.

[0177] “ErbB2” or “HER2” refers to a putative tyrosine kinase growth factor receptor EGFR2, p185 HER2/NEU antigen, similar to the EGF receptor. The aa sequences for ErbB2 isoforms are provided at Genbank Accession Nos. NP_{—}004439.2 and NP_{—}001005862.1, and the nucleotide sequence has GeneID 2064.

[0178] “ErbB3” or “HER3” refers to a receptor tyrosine-protein kinase that is encoded by the human ERBB3 gene and has a role in protein amino acid phosphorylation. The aa sequences for ErbB3 isoforms are provided at Genbank Accession Nos. NP_{—}001973.2 and NP_{—}001005915.1, and the nucleotide sequence has GeneID 2065.

[0179] “ErbB4” or “HER4” plays a role in receptor tyrosine kinase signal transduction that regulates cellular proliferation and differentiation. The aa sequences for ErbB3 isoforms are provided at Genbank Accession Nos. NP_{—}001973.2 and NP_{—}001005915.1, and the nucleotide sequence has GeneID 2066.

[0180] The ERBB2, ERBB3, and ERBB4 genes encode heregulin/neuregulin receptors, members of the EGFR-related type I receptor tyrosine kinase subfamily. The encoded proteins form homo- and heterodimers, which complicates assignment of function: ERBB2 homodimers do not bind heregulin, but ERBB2/ERBB3 heterodimers do. Herstatin is a secreted alternative ERBB2 product, of the extracellular domain, that binds to p185ERBB2, disrupts ERBB2 dimers, reduces p185 phosphorylation, and inhibits growth. Human ERBB2 gene is located at 17p12-21. Overexpression of HER-2 correlates with poor prognosis in breast carcinoma.

[0181] “IGF1R” refers to the insulin-like growth factor 1 receptor. Exemplary human IGF1R nucleic acid and protein sequences are set forth in RefSeqGene Gene ID: 3480 and GenBank Accession Number: NP_{—}000866.1, respectively.

[0182] “IGF2R” refers to the insulin-like growth factor 2 receptor. Exemplary human IGF2R nucleic acid and protein sequences are set forth in RefSeqGene Gene ID: 3482 and GenBank Accession Number: NP_{—}000867.2, respectively.

[0183] “Insulin receptor” refers to the cellular receptor for insulin. Exemplary human insulin receptor nucleic acid and protein sequences are set forth in RefSeqGene Gene ID: 3643 and GenBank Accession Number: NP_{—}000199.2, respectively.

[0184] “c-MET” refers to the receptor for Hepatocyte Growth Factor. Exemplary human c-Met nucleic acid and protein sequences are set forth in RefSeqGene Gene ID: 4233 and GenBank Accession Number: NP_{—}001120972.1, respectively.

[0185] “RON” refers to the receptor for Macrophage-stimulating protein receptor. Exemplary human RON nucleic acid and protein sequences are set forth in RefSeqGene Gene ID: 4486 and GenBank Accession Number: NP_{—}002438.2, respectively.

[0186] “c-Kit” refers to v-kit Hardy-Zuckerman 4 feline sarcoma viral oncogene homolog. Exemplary human c-Kit nucleic acid and protein sequences are set forth in RefSeqGene Gene ID: 3815 and GenBank Accession Number: NP_{—}001087241.1, respectively.

[0187] “VEGFR1” refers to vascular endothelial growth factor 1. Exemplary human VEGFR1 nucleic acid and protein sequences are set forth in RefSeqGene Gene ID: 2321 and GenBank Accession Number: NP_{—}002010.2, respectively.

[0188] “VEGFR2” refers to vascular endothelial growth factor 2. Exemplary human VEGFR2 nucleic acid and protein sequences are set forth in RefSeqGene Gene ID: 3791 and GenBank Accession Number: NP_{—}002244.1, respectively.

[0189] “TNFR” refers to tumor necrosis factor receptor. Exemplary human TNFR nucleic acid and protein sequences are set forth in RefSeqGene Gene ID: 7132 and GenBank Accession Number: NP_{—}001056.1, respectively.

[0190] “FGFR1” refers to fibroblast growth factor receptor 1. Exemplary human FGFR1 nucleic acid and protein sequences are set forth in RefSeqGene Gene ID: 2260 and GenBank Accession Number: NP_{—}001167537.1, respectively.

[0191] “FGFR2” refers to fibroblast growth factor receptor 2. Exemplary human FGFR2 nucleic acid and protein sequences are set forth in RefSeqGene Gene ID: 2263 and GenBank Accession Number: NP_{—}001138390.1, respectively.

[0192] “FGFR3” refers to fibroblast growth factor receptor 3. Exemplary human FGFR3 nucleic acid and protein sequences are set forth in RefSeqGene Gene ID: 2261 and GenBank Accession Number: NP_{—}000133.1, respectively.

[0193] “FGFR4” refers to fibroblast growth factor receptor 4. Exemplary human FGFR4 nucleic acid and protein sequences are set forth in RefSeqGene Gene ID: 2264 and GenBank Accession Number: NP_{—}075252.2, respectively.

[0194] “PDGFR-alpha” refers to platelet-derived growth factor receptor alpha. Exemplary human PDGFR-alpha nucleic acid and protein sequences are set forth in RefSeqGene Gene ID: 5156 and GenBank Accession Number: NP_{—}006197.1, respectively.

[0195] “PDGFR-beta” refers to platelet-derived growth factor receptor beta. Exemplary human PDGFR-beta nucleic acid and protein sequences are set forth in RefSeqGene Gene ID: 5159 and GenBank Accession Number: NP_{—}002600.1, respectively.

[0196] “EpCAM” refers to epithelial cell adhesion molecule. Exemplary human EpCAM nucleic acid and protein sequences are set forth in RefSeqGene Gene ID: 4072 and GenBank Accession Number: NP_{—}002345.2, respectively.

[0197] “EphA2” refers to EPH receptor A2. Exemplary human EphA2 nucleic acid and protein sequences are set forth in RefSeqGene Gene ID: 1969 and GenBank Accession Number: NP_{—}004422.2, respectively.

[0198] “CEA” refers to carcinoembryonic antigen-related cell adhesion molecule 5. Exemplary human CEA nucleic acid and protein sequences are set forth in RefSeqGene Gene ID: 1048 and GenBank Accession Number: NP_{—}004354.2, respectively.

[0199] “CD44” refers to the cell-surface glycoprotein CD44. Exemplary human CD44 nucleic acid and protein sequences are set forth in RefSeqGene Gene ID: 960 and GenBank Accession Number: NP_{—}001189486.1, respectively.

[0200] “ALK” refers to the anaplastic lymphoma receptor tyrosine kinase. Exemplary human ALK nucleic acid and protein sequences are set forth in RefSeqGene Gene ID: 238 and GenBank Accession Number: NP_{—}004295.2, respectively.

[0201] “AXL” refers to the AXL receptor tyrosine kinase. Exemplary human AXL nucleic acid and protein sequences are set forth in RefSeqGene Gene ID: 558 and GenBank Accession Number: NP_{—}068713.2, respectively.

[0202] “EU” indicates that aa positions in a heavy chain constant region, including aa positions in the CH1, hinge, CH2, and CH3 domains, are numbered herein according to the EU index numbering system (see Kabat et al., in “Sequences of Proteins of Immunological Interest”, U.S. Dept. Health and Human Services, 5^{th} edition, 1991).

[0203] “Fab” refers to the antigen binding portion of an antibody, comprising two chains: a first chain that comprises a VH domain and a CH1 domain and a second chain that comprises a VL domain and a CL domain. Although a Fab is typically described as the N-terminal fragment of an antibody that was treated with papain and comprises a portion of the hinge region, it is also used herein as referring to a binding domain wherein the heavy chain does not comprise a portion of the hinge.

[0204] “Fc region” refers to the portion of a single immunoglobulin heavy chain beginning in the hinge region just upstream of the papain cleavage site (i.e. residue 216 in IgG, taking the first residue of heavy chain constant region to be 114) and ending at the C-terminus of the antibody. Accordingly, a complete Fc region comprises at least a hinge, a CH2 domain, and a CH3 domain. Two Fc regions that are dimerized are referred to as “Fc” or “Fc dimer.” An Fc region may be a naturally occurring Fc region, or a naturally occurring Fc region in which one or more aas have been substituted, added or deleted, provided that the Fc region has the desired biological properties. A desired biological activity may be a natural biological activity, an enhanced biological activity or a reduced biological activity relative to that of the naturally occurring domain.

[0205] “Framework region” or “FR” or “FR region” includes the aa residues that are part of the variable region, but are not part of the CDRs (e.g., using the Kabat definition of CDRs). Therefore, a variable region framework is between about 100-120 aas in length but includes only those aas outside of the CDRs. For the specific example of a heavy chain variable region and for the CDRs as defined by Kabat et al., 1991, ibid., framework region 1 corresponds to the domain of the variable region encompassing aas 1-30; framework region 2 corresponds to the domain of the variable region encompassing aas 36-49; framework region 3 corresponds to the domain of the variable region encompassing aas 66-94, and framework region 4 corresponds to the domain of the variable region from aas 103 to the end of the variable region. The framework regions for the light chain are similarly separated by each of the light chain variable region CDRs. Similarly, using the definition of CDRs by Chothia et al. or McCallum et al. the framework region boundaries are separated by the respective CDR termini as described above. In preferred embodiments, the CDRs are as defined by Kabat.

[0206] “Full length antibody” or “full length Ab” is an antibody (“Ab”) that comprises one or more heavy chains and one or more light chains, which optionally may be connected. Each heavy chain is comprised of a heavy chain variable region (abbreviated herein as VH) and a heavy chain constant region. The heavy chain constant region is comprised of three domains CH1, CH2, and CH3, and optionally a fourth domain, CH4. Each light chain is comprised of a light chain variable region (abbreviated herein as VL) and a light chain constant region. The light chain constant region is comprised of one domain, CL. The VH and VL regions can be further subdivided into regions of hypervariability, termed complementarity determining regions (CDR), interspersed with regions that are more conserved, termed framework regions (FR). Each VH and VL is typically composed of three CDRs and four FRs, arranged from amino-terminus to carboxyl-terminus in the following order: FR1, CDR1, FR2, CDR2, FR3, CDR3, and FR4. Immunoglobulin proteins can be of any type or class (e.g., IgG, IgE, IgM, IgD, IgA and IgY) or subclass (e.g., IgG1, IgG2, IgG3, IgG4, IgA1 and IgA2).

[0207] “Gly-Ser linker” or “Gly-Ser peptide” refers to a peptide that consists of glycine and serine residues. An exemplary Gly-Ser peptide comprises the aa sequence (Gly4 Ser)n, wherein n=1, 2, 3, 4, 5, 6, 7, 8, 9, 10, 11, 12, 13, 14, 15, 16, 17, 18, 19, 20 or more. In certain embodiments, n is a number between 1 and 5, n is a number between 6 and 10, n is a number between 11 and 15, n is a number between 16 and 20, n is a number between 21 and 25, or n is a number between 26 and 30.

[0208] “Hinge” or “hinge region” or “hinge domain” refers to the flexible portion of a heavy chain located between the CH1 domain and the CH2 domain. It is approximately 25 aas long, and is divided into an “upper hinge,” a “middle hinge” or “core hinge,” and a “lower hinge.” A hinge may be a naturally occurring hinge, or a naturally occurring hinge in which one or more aas have been substituted, added or deleted, provided that the hinge has the desired biological properties. A desired biological activity may be a natural biological activity, an enhanced biological activity or a reduced biological activity relative to the naturally occurring sequence.

[0209] A “hinge subdomain” refers to the upper hinge, middle (or core) hinge or the lower hinge. The aa sequences of the hinge subdomains of an IgG1, IgG2, IgG3 and IgG4 are set forth in Table 2:

TABLE 2
Listing of IgG hinge subdomains

| | Upper | Middle | Lower | Complete |
|---|---|---|---|---|
| IgG | hinge | hinge | hinge | hinge |
| IgG1 | EPKSCDKTHT | CPPCP | APELLG | SEQ ID |
| | (SEQ ID | (SEQ ID | (SEQ ID | NO: 4 |
| | NO: 1) | NO: 2) | NO: 3) | |
| IgG2 | ERKCCVE | CPPCP | APPVAGP | SEQ ID |
| | (SEQ ID | (SEQ ID | (SEQ ID | NO: 7 |
| | NO: 5) | NO: 2) | NO: 6) | |
| IgG3 | ELKTPL | CPRCP(EPKSC | APELLG | SEQ ID |
| | GDTTHT | DTPPPCPRCP)₃ | (SEQ ID | NO: 11 |
| | (SEQ ID | (SEQ ID | NO: 10) | |
| | NO: 8) | NO: 9) | | |
| IgG4 | ESKYGPP | CPSCP | APEFLG | SEQ ID |
| | (SEQ ID | (SEQ ID | (SEQ ID | NO: 15 |
| | NO: 12) | NO: 13) | NO: 14) | |

[0210] The complete hinge consists of the upper hinge subdomain, middle hinge subdomain and lower hinge subdomain in amino to carboxy terminal order and without intervening sequences.

[0211] “IC₅₀,” or “IC50” refers to the concentration of a molecule, e.g., a TFcA, that provides a 50% inhibition of a maximal activity (e.g., a response to a stimulus or a constitutive activity), i.e., a concentration that reduces the activity to a level halfway between the maximal activity and the baseline. The IC₅₀ value may be converted to an absolute inhibition constant (Ki) using, e.g., the Cheng-Prusoff equation. In a system that is inhibited by a binding agent, such as an antibody or a TFcA provided herein, the IC50 may be indistinguishable from the EC50.

[0212] “Inhibition” of a biological activity by a binding protein refers to any reproducibly detectable decrease in biological activity mediated by the binding protein. In some embodiments, inhibition provides a statistically significant decrease in biological activity, e.g., a decrease of about 5%, 10%, 20%, 30%, 40%, 50%, 60%, 70%, 80%, 90%, or 100% in biological activity relative to the biological activity determined in he absence of the binding protein.

[0213] “Isolated,” in reference to polynucleotides, polypeptides or proteins, means that the polynucleotide, polypeptide or protein is substantially removed from polynucleotides, polypeptides, proteins or other macromolecules with which it, or its analogues, occurs in nature. Although the term “isolated” is not intended to require a specific degree of purity, typically, the protein will be at least about 75% pure, more preferably at least about 80% pure, more preferably at least about 85% pure, more preferably at least about 90% pure, more preferably still at least about 95% pure, and most preferably at least about 99% pure. In certain embodiments, a TFcA, e.g., a TFcBA, is an isolated TFcA. In certain embodiments, a TFcA is a monoclonal TFcA.

[0214] “Kabat” in conjunction with designation of immunoglobulin aa sequence positions indicates that amino acid positions in a light chain constant region (e.g. CL domain) are numbered according to the Kabat index numbering system (see Kabat et al., 1991., op. cit.).

[0215] “Linked to” refers to direct or indirect linkage or connection of, in context, amino acids or nucleotides. An “indirect linkage” refers to a linkage that is mediated through a linker or a domain, comprising, e.g., one or more aas or nucleotides. A “direct linkage” or “linked directly” when referring to two polypeptide segments refers to the presence of covalent bond between the two polypeptide segments, e.g., the two polypeptide segments are joined contiguously without intervening sequences.

[0216] “Linker” refers to one or more aas connecting two domains or regions together. A linker may be flexible to allow the domains being connected by the linker to form a proper three dimensional structure thereby allowing them to have the required biological activity. A linker connecting the VH and the VL of an scFv is referred to herein as an “scFv linker” A linker connecting the N-terminus of a VH domain or the C-terminus of the CH3 domain to a second VH or VL domain, e.g., that of an scFv, is referred to as a “connecting linker”

[0217] “Module” refers to a structurally and/or functionally distinct part of a TFcA, such a binding site (e.g., an scFv domain or a Fab domain) and the TFc. Modules provided herein can be rearranged (by recombining sequences encoding them, either by recombining nucleic acids or by complete or fractional de novo synthesis of new polynucleotides) in numerous combinations with other modules to produce a wide variety of TFcAs, e.g., as disclosed herein. “Module” is also used to refer to the type of AEM or DiS modifications. In this context, and as further described herein, a “module” is one or a combination of two or more aa substitutions, additions or deletions that are made to enhance or favor the association or dimerization of the Fc regions comprising these modifications.

[0218] “Percent identical” or “% identical” refers to two or more nucleic acid or polypeptide sequences or subsequences that are the same (100% identical) or have a specified percentage of nucleotide or aa residues that are the same, when the two sequences are aligned for maximum correspondence and compared. To align for maximum correspondence, gaps may be introduced into one of the sequences being compared. The aa residues or nucleotides at corresponding positions are then compared and quantified. When a position in the first sequence is occupied by the same residue as the corresponding position in the second sequence, then the sequences are identical at that position. The percent identity between the two sequences is a function of the number of identical positions shared by the sequences (e.g., % identity=# of identical positions/total # of positions (e.g., overlapping positions)×100). In certain embodiments, the two sequences are the same length. The determination that one sequence is a measured % identical with another sequence can be determined using a mathematical algorithm. A non-limiting example of a mathematical algorithm utilized for such comparison of two sequences is incorporated in the ALIGN program (version 2.0) which is part of the GCG sequence alignment software package. When utilizing the ALIGN program e.g., for comparing aa sequences, a PAM120 weight residue table, a gap length penalty of 12, and a gap penalty of 4 may be used. Additional algorithms for sequence analysis are well known in the art and many are available online.

[0219] “Portion” or “fragment” (e.g., of a domain) of a reference moiety refers to a discrete part of the whole reference moiety (e.g., domain, e.g., a naturally occurring domain) that is at least, or at most 10% 20%, 30%, 40%, 50%, 60%, 70%, 80%, 90%, 95%, 98%, or 99% of the size of the reference moiety.

[0220] “scFv linker” refers to a peptide or polypeptide domain interposed between the VL and VH domains of an scFv. scFv linkers preferably allow orientation of the VL and VH domains in a antigen binding conformation. In one embodiment, an scFv linker comprises or consists of a peptide or polypeptide linker that only comprises glycines and serines (a “Gly-Ser linker”). In certain embodiments, an scFv linker comprises a disulfide bond.

[0221] “Similarity” or “percent similarity” in the context of two or more polypeptide sequences, refer to two or more sequences or subsequences that have a specified percentage of aa residues that are the same or conservatively substituted when compared and aligned for maximum correspondence. By way of example, a first aa sequence can be considered similar to a second aa sequence when the first aa sequence is at least 50%, 60%, 70%, 75%, 80%, 90%, 95%, 97%, 98% or even 99% identical, or conservatively substituted, to the second aa sequence when compared to an equal number of aas as the number contained in the first sequence, or when compared to an alignment of polypeptides that has been aligned by a computer similarity program known in the art. These terms are also applicable to two or more polynucleotide sequences.

[0222] “Specific binding,” “specifically binds,” “selective binding,” and “selectively binds,” as well as “binds specifically” “binds selectively,” when referring to the binding of a binding site to its target epitope or a combination of binding sites to their target epitopes, means that the binding site(s) exhibit(s) immunospecific binding to the target epitope(s). A binding site that binds specifically to an epitope exhibits appreciable affinity for a target epitope and, generally, does not exhibit cross-reactivity with other epitopes in that it does not exhibit appreciable affinity to any unrelated epitope and preferably does not exhibit affinity for any unrelated epitope that is equal to, greater than, or within two orders of magnitude lower than the affinity for the target epitope. “Appreciable” or preferred binding includes binding with a dissociation constant (Kd) of 10⁻⁸, 10⁻⁹ M, 10⁻¹⁰, 10⁻¹¹, 10⁻¹² M, 10⁻¹³ M or an even lower Kd value. Note that lower values for Kd (dissociation constant) indicate higher binding affinity, thus a Kd of 10⁻⁷ is a higher Kd value than a Kd of 10⁻⁸, but indicates a lower binding affinity than a Kd of 10⁻⁸. Dissociation constants with values of about 10⁻⁷M, and even as low as about 10⁻⁸M, are at the high end of dissociation constants suitable for therapeutic antibodies. Binding affinities may be indicated by a range of dissociation constants, for example, 10⁻⁶ to 10⁻¹² M, 10⁻⁷ to 10⁻¹²M, 10⁻⁸ to 10⁻¹²M or better (i.e., or lower value dissociation constant). Dissociation constants in the nanomolar (10⁻⁹ M) to picomolar (10⁻¹²M) range or lower are typically most useful for therapeutic antibodies. Suitable dissociation constants are Kds of 50 nM or less (i.e., a binding affinity of 50 nM or higher—e.g., a Kd of 45 nM) or Kds of 40 nM, 30 nM, 20 nM, 10 nM, 1 nM, 100 pM, 10 pM or 1 pM or less. Specific or selective binding can be determined according to any art-recognized means for determining such binding, including, for example, according to Scatchard analysis and/or competitive binding assays.

[0223] A “TFc” or “tandem Fc” refers to an entity comprising in an amino to carboxyl terminal order: a first Fc region, which is linked at its C-terminus to the N-terminus of a TFc linker, which is linked at its C-terminus to the N-terminus of a second Fc region, wherein the first and the second Fc regions associate to form an Fc.

[0224] “TFcA” refers to a tandem Fc antibody. A TFcA may be a monovalent or monospecific TFcA, e.g., comprising a single binding site. A TFcA may also be a bispecific TFcA, which is referred to herein as a TFcBA. A TFcA may be monoclonal.

[0225] “TFcBA” refers to a tandem Fc bispecific antibody, an artificial hybrid protein comprising at least two different binding moieties or domains and thus at least two different binding sites (e.g., two different antibody binding sites), wherein one or more of the pluralities of the binding sites are covalently linked, e.g., via peptide bonds, to each other. An exemplary TFcBA described herein is an anti-c-Met+anti-EGFR TFcBA, which is a polyvalent bispecific antibody that comprises a first binding site binding specifically to a c-Met protein, e.g., a human c-Met protein, and one or more second binding sites binding specifically to an EGFR protein, e.g., a human EGFR protein. When a TFcBA name comprises two antigens separated by a plus sign (+) this indicates that the binding sites for the two antigens may be in either relative amino to carboxy orientation in the molecule, whereas when the TFcBA name comprises two antigen binding site names separated by a slash (/) the antigen binding site to the left of the slash is amino terminal to the antigen binding site to the right of the slash. A TFcBA may be a bivalent binding protein, a trivalent binding protein, a tetravalent binding protein or a binding protein with more than 4 binding sites. An exemplary TFcBA is a bivalent bispecific antibody, i.e., an antibody that has 2 binding sites, each binding to a different antigen or epitope. In certain embodiments, the N-terminal binding site of a TFcBA is a Fab and the C-terminal binding site is an scFv.

### Tandem Fc Abs

[0226] Provided herein are Tandem Fc Antibodies (“TFcAs”), which may be monovalent or polyvalent, e.g., bivalent, trivalent, or tetravalent. TFcAs which are polyvalent may be monospecific, bispecific (“Tandem Fc Bispecific Abs” or “TFcBAs”) trispecific or tetraspecific TFcBAs. When a TFcBA is multispecific, it may be monovalent for one or more specificities.

[0227] In certain embodiments, a TFcA is a TFcBA. Exemplary TFcBAs inhibit ligand-induced signal transduction through one or both of the receptors targeted by the TFcBA and may thereby inhibit tumor cell proliferation or tumor growth. TFcBAs may also induce receptor downregulation or block receptor dimerization. Exemplary anti c-Met/anti-EGFR TFcBAs comprise a single anti-c-Met binding site (monovalent for anti-c-Met) and one or more anti-EGFR binding sites (monovalent or polyvalent for anti-EGFR). A TFc typically comprises a first Fc region linked to a second Fc region through a TFc linker, wherein the first and the second Fc regions dimerize to form an Fc.

[0228] FIG. 1A and FIG. 1B show a diagram of an exemplary TFcBA showing the various elements of the molecule. As shown in FIGS. 1A and 1B, a TFcBA comprises a first binding site (e.g., an anti-c-Met Fab), a second binding site (e.g., an anti-EGFR scFv), and a tandem Fc (“TFc”) that links the first and the second binding sites together. A TFcBA may be described as containing three modules, wherein the first module comprises the first binding site, the second module comprises the TFc and the third module comprises the second binding site. A TFc generally comprises in a contiguous aa sequence a first Fc region, a TFc linker, and a second Fc region, wherein the TFc linker links the first Fc region to the second Fc region and allows the association of the two Fc regions. As illustrated in the exemplary TFcBA in FIG. 1A and FIG. 1B, each of the two Fc regions of a TFc may comprise a hinge, a CH2 domain and a CH3 domain. Each of these regions may be from the same immunoglobulin isotype, or from different isotypes. For example, the hinge, CH2 and CH3 domains may all be from IgG1, IgG2, IgG3 or IgG4, or certain domains or portions thereof may be from one immunoglobulin isotype and another domain or portion may be from another immunoglobulin isotype. For example, the TFcBA that is pictured in FIGS. 1A and 1B comprises all domains from IgG1, or alternatively, it may comprise an IgG1/IgG4 hybrid hinge, an IgG4 CH2 domain and an IgG1 CH3 domain. An Fc region preferably comprises human Fc domains, however, sequences from other mammals or animals may also be used, provided that the TFcBA retains its biological activity and is preferably not significantly immunogenic in a human subject.

[0229] In preferred embodiments, the first and/or the second Fc region comprise one or more modifications to enhance their association and/or to stabilize such association. In certain embodiments, the first and/or the second CH3 domains of a TFcA comprises one or more modification to enhance the association of the CH3 domains or Fcs comprising such. Such modifications are referred to herein as Association Enhancing Modifications or “AEMs.” Exemplary modifications include aa substitutions in both CH3 domains to enhance their interaction, e.g., knob/hole mutations.

[0230] In certain embodiments, the first and/or the second Fc region comprises an aa modification that results in the addition of one or more cysteines to the Fc region, to thereby form a disulfide bond with the other Fc region of the TFc. Such modifications are referred to herein as disulfide forming modifications or “DiS” modifications. DiS modifications may be present in the hinge, CH2 and/or CH3 domains.

[0231] A TFc may comprise one or more AEM and/or one or more DiS modifications. FIG. 1B shows exemplary modifications that can be made to either the CH3 region or the hinge. Fc regions may also comprise additional modifications, e.g., modifications that modulate a biological activity that is mediated through the Fc region, such as ADCC.

[0232] Although generally, the first and the second Fc regions comprise a hinge, a CH2 domain and a CH3 domain, in certain embodiments, an Fc region may comprise a CH3 domain and a CH2 domain, but no hinge. In other embodiments, an Fc region comprises a CH3 domain and a hinge, but does not comprise a CH2 domain. In other embodiments, an Fc region may comprise a CH3 domain and a CH4 domain, but does not comprise a CH2 domain nor a hinge. In other embodiments, an Fc region may comprise a CH3 domain, a CH4 domain, a CH2 domain, but does not comprise a hinge. In other embodiments, an Fc region may comprise a CH3 domain, a CH4 domain, a hinge, but does not comprise a CH2 domain. In certain embodiments, a portion of one or more domains is absent.

[0233] In certain embodiments, the first Fc region comprises an aa sequence that differs from that of the second Fc region in one or more aa addition, deletion or substitution (a “heterodimeric Fc”). This is often the case as AEM and DiS modifications, which typically introduce different modifications to the first and the second Fc region. In other embodiments, the first Fc region comprises the same aa sequence as the second Fc region (a “homodimeric Fc”).

[0234] In certain embodiments, an Fc domain (hinge, CH2 or CH3 domain) is directly linked to another Fc domain. For example, a hinge may be directly linked to a CH2 domain and/or a CH2 domain may be directly linked to a CH3 domain. In other embodiments, an Fc domain is linked to another Fc domain through a linker, which may be one or more aas long, provided that the TFcA comprising these domains has the desired biological activity and stability and any other desired characteristics.

[0235] In certain embodiments, a binding site is an antigen binding site, which comprises, e.g., a heavy chain variable (VH) domain and a light chain variable (VL) domain. The VH and VL domains generally contain 3 Complementarity Determining Regions (CDRs) each, although in certain embodiments, fewer than 6 CDRs may be sufficient for providing specific binding to an antigen. In certain embodiments, the VH domain is part of a Fab, in which case, the VH domain is linked to a CH1 domain, generally in the natural order, i.e., the VH domain is linked to the N-terminus of the CH1. When the antigen binding site is part of a Fab, the VL domain may be linked to a light chain constant (CL) domain, generally in the natural order, i.e., the VL domain is linked to the N-terminus of the CL domain.

[0236] The variable domains (VH and VL) may be linked directly or indirectly to the constant domains (CH1 and CL), e.g., through a linker, which may be one or more aas long, provided that the TFcA comprising these domains has the desired biological activity and stability and any other desired characteristics.

[0237] In certain embodiments, the VH domain is part of an scFv, in which case, the VH domain is linked to the VL domain through an scFv linker, and the scFv is linked to the N- and/or C-terminus of a TFc. When a binding site is an scFv, the variable regions are generally not linked to a CH1 or CL domain.

[0238] In certain embodiments, a TFcA is monovalent and monospecific. A monovalent TFcA may comprise a binding site at the amino terminus or at the C-terminus of the TFc. The binding site of a monovalent TFcA may be a Fab or an scFv. Exemplary heavy chains of monovalent TFcAs comprise in amino to carboxyl terminal order:
[0239] i) a VH domain and a TFc;
[0240] ii) a VH domain, a CH1 domain, and a TFc;
[0241] iii) a VH domain, an scFv linker, a VL domain, and a TFc;
[0242] iv) a TFc, a connecting linker and a VH domain;
[0243] v) a TFc, a connecting linker, a VH domain and a CH1 domain; and
[0244] vi) a TFc, a connecting linker, a VH domain, an scFv linker and a VL domain.

[0245] When a TFcA comprises a Fab, the TFcA also comprises a light chain comprising the VL domain of the Fab and optionally a CL domain.

[0246] In certain embodiments, a TFcA is a TFcBA. TFcBAs may comprise one Fab binding specifically to a first antigen and a second Fab binding specifically to a second antigen. TFcBAs may also comprise a first scFv binding specifically to a first antigen and a second scFv binding specifically to a second antigen. TFcBAs may also comprise a Fab binding specifically to a first antigen and an scFv binding specifically to a second antigen. In certain embodiments, the amino terminus of a TFc is connected to a Fab and the carboxyl terminus of the TFc is connected to an scFv. Alternatively, the amino terminus of a TFc is connected to an scFv and the carboxyl terminus of the TFc is connected to a Fab. Exemplary molecules have the following format: Fab-TFc-scFv; Fab-TFc-Fab; scFv-TFc-scFv; and scFv-TFc-Fab.

[0247] In one embodiment, a TFcBA comprises a heavy chain, which comprises in amino to carboxyl-terminal order:
[0248] (i) a first VH domain, a TFc, a connecting linker, and a second VH domain;
[0249] (ii) a first VH domain, a CH1 domain, a TFc, a connecting linker, and a second VH domain;
[0250] (iii) a first VH domain, a CH1 domain, a TFc, a connecting linker, a second VH domain, an scFv linker and a second VL domain, wherein the second VH and VL domains associate to form a second binding site;
[0251] (iv) a first VH domain, a TFc, a connecting linker, a second VH domain, and a CH1 domain;
[0252] (v) a first VH domain, a first CH1 domain, a TFc, a connecting linker, a second VH domain and a second CH1 domain;
[0253] (vi) a first VH domain, a first scFv linker, a first VL domain, a TFc, a connecting linker, and a second VH domain, wherein the first VL and VH domains associate to form a first binding site;
[0254] (vii) a first VH domain, a first scFv linker, a first VL domain, a TFc, a connecting linker, a second VH domain, and a CH1 domain, wherein the first VL and VH domains associate to form a first binding site; and
[0255] (viii) a first VH domain, a first scFv linker, a first VL domain, a TFc, a connecting linker, a second VH domain, a second scFv linker, and a second VL domain, wherein the first VH and VL domains form a first binding site and the second VH and VL domains form a second binding site.

[0256] A TFcBA of (i)-(v) may further comprise a light chain comprising a first VL domain and optionally a CL domain located at the C-terminus of the VL domain, wherein the first VH and VL domains associate to form a first binding site. A TFcBA of (i), (ii), (iv)-(vii) may comprise a light chain comprising a second VL domain and optionally a CL domain located at the C-terminus of the VL domain, wherein the first VH and VL domains associate to form a second binding site.

[0257] In certain embodiments, a heavy chain comprises a first VH domain, which is linked at its C-terminus to the N-terminus of a TFc, which is linked at its C-terminus to the N-terminus of a connecting linker, which is linked at its C-terminus to the N-terminus of a second VH domain. In certain embodiments, a heavy chain comprises a first VH domain, which is linked at its C-terminus to the N-terminus of a CH1 domain, which is linked at its C-terminus to the N-terminus of a TFc, which is linked at its C-terminus to the N-terminus of a connecting linker, which is linked at its C-terminus to the N-terminus of a second VH domain. In certain embodiments, a heavy chain comprises a first VH domain, which is linked at its C-terminus to the N-terminus of a CH1 domain, which is linked at its C-terminus to the N-terminus of a TFc, which is linked at its C-terminus to the N-terminus of a connecting linker, which is linked at its C-terminus to the N-terminus of a second VH domain, which is linked at its C-terminus to the N-terminus of an scFv linker, which is linked at its C-terminus to the N-terminus of a second VL domain, wherein the second VH and VL domains associate to form a second binding site. In certain embodiments, a heavy chain comprises a first VH domain, which is linked at its C-terminus to the N-terminus of a TFc, which is linked at its C-terminus to the N-terminus of a connecting linker, which is linked at its C-terminus to the N-terminus of a second VH domain, which is linked at its C-terminus to the N-terminus of a CH1 domain. In certain embodiments, a heavy chain comprises a first VH domain, which is linked at its C-terminus to the N-terminus of a first CH1 domain, which is linked at its C-terminus to the N-terminus of a TFc, which is linked at its C-terminus to the N-terminus of a connecting linker, which is linked at its C-terminus to the N-terminus of a second VH domain, which is linked at its C-terminus to the N-terminus of a second CH1 domain. In certain embodiments, a heavy chain comprises a first VH domain, which is linked at its C-terminus to the N-terminus of a first scFv linker, which is linked at its C-terminus to the N-terminus of a first VL domain, which is linked at its C-terminus to the N-terminus of a TFc, which is linked at its C-terminus to the N-terminus of a connecting linker, which is linked at its C-terminus to the N-terminus of a second VH domain, wherein the first VH and VL domains associate to form a first binding site. In certain embodiments, a heavy chain comprises a first VH domain, which is linked at its C-terminus to the N-terminus of a first scFv linker, which is linked at its C-terminus to the N-terminus of a first VL domain, which is linked at its C-terminus to the N-terminus of a TFc, which is linked at its C-terminus to the N-terminus of a connecting linker, which is linked at its C-terminus to the N-terminus of a second VH domain, which is linked at its C-terminus to the N-terminus of a CH1 domain, wherein the first VH and VL domains associate to form a first binding site. In certain embodiments, a heavy chain comprises a first VH domain, which is linked at its C-terminus to the N-terminus of a first scFv linker, which is linked at its C-terminus to the N-terminus of a first VL domain, which is linked at its C-terminus to the N-terminus of a TFc, which is linked at its C-terminus to the N-terminus of a connecting linker, which is linked at its C-terminus to the N-terminus of a second VH domain, which is linked at its C-terminus to the N-terminus of a second scFv linker, which is linked at its C-terminus to the N-terminus of a second VL domain, wherein the first VH and VL domains form a first binding site and the second VH and VL domains form a second binding site.

[0258] In certain embodiments, a VL domain is substituted for the VH domain and the VH domain is substituted for the VL domain in the constructs above.

[0259] When the heavy chain does not comprise either a first or a second VL domain, a VL domain may be provided by a light chain. A light chain may comprise a first or a second VL domain and optionally a CL domain. For example, an scFv may comprise in amino to carboxy terminal order a VL domain, an scFv linker and a VH domain.

[0260] In certain embodiments, a TFcBA comprises a first antigen binding site that binds specifically to a first receptor and a second antigen binding site that binds specifically to a second receptor. In certain embodiments, the first antigen binding site that binds specifically to the first receptor is a Fab and the second antigen binding site that binds specifically to the second receptor is an scFv. Exemplary combinations of binding sites are set forth in Table 3, wherein a “yes” indicates a possible combination and anti-c-Met+anti-EGFR TFcBAs are used to illustrate the possible combinations:

TABLE 3
Exemplary combinations of binding sites of anti-c-Met + anti-EGFR
TFcBAs

| | | Binding site linked to the N-terminus | | | |
|---|---|---|---|---|---|
| | | of the TFc | | | |
| | | Anti-c- | Anti-c- | Anti- | Anti- |
| | | Met | Met | EGFR | EGFR |
| | | scFv | Fab | scFv | Fab |
| Binding site | Anti-c-Met | yes | yes | yes | yes |
| linked to the | scFv | | | | |
| C-terminus | Anti-c-Met | yes | yes | yes | yes |
| of the TFc | Fab | | | | |
| | Anti-EGFR | yes | yes | yes | yes |
| | scFv | | | | |
| | Anti-EGFR | yes | yes | yes | yes |
| | Fab | | | | |

[0261] In certain embodiments, a TFcBA comprises more than 2 binding sites. A TFcBA may comprise 3, 4, 5, 6 or more binding sites. Additional binding sites may be linked, e.g., to the N- and/or C-terminus of a TFcA or TFcBA. For example, a heavy chain may comprise one or more Fabs and/or scFvs linked to the amino- or carboxyl-terminus of the TFc.

[0262] Exemplary domains of TFcBAs are further described below.

### Exemplary Hinges

[0263] In one embodiment, the first and/or the second Fc region of a TFcA, e.g., a TFcBA, comprises an IgG upper hinge, an IgG middle hinge and/or an IgG lower hinge. For example, an Fc region may comprise one or more IgG1 upper, middle and lower hinge, e.g., set forth in SEQ ID NOs:1, 2 and 3, respectively (see Table 2). Fc regions may also comprise one or more of an IgG2 upper, middle and lower hinge, e.g., set forth in SEQ ID NOs:5, 2 and 6, respectively (the middle hinge of IgG1 and IgG2 have the same aa sequence/see Table 2). Fc regions may also comprise one or more of an IgG3 upper, middle and lower hinge, e.g., set forth in SEQ ID NOs:8, 9 and 10, respectively (Table 2). Fc regions may also comprise one or more of an IgG4 upper, middle and lower hinge, e.g., set forth in SEQ ID NOs:12, 13 and 14, respectively (Table 2). Fc regions may also comprise one or more mouse Ig sequences or IgA1 or IgA2 sequences.

[0264] A first and/or a second Fc region of a TFcA may also comprise an aa sequence of an upper, middle, or lower hinge having an aa sequence that differs from a naturally occurring sequence, such as a sequence set forth herein (e.g., SEQ ID NOs:1-14) comprising up to 1, 2, 3, 4, or 5 aa modifications, e.g., aa substitutions, deletions or additions. For example, the following IgG1 upper hinges may be used:

EPKSCDKTCC (SEQ ID NO:16; corresponds to SEQ ID NO:1 with the aa substitutions H224C and T225C (underlined)) and
EPKSCDKCHT (SEQ ID NO:17; corresponds to SEQ ID NO:1 with the aa substitution T223C (underlined)).

[0265] The amino acid numbering of the hinge residues referred to herein is according to their numbering in a full length antibody (EU numbering; see FIG. 2).

[0266] In one embodiment, the first and/or the second hinge of a TFcA is a full length wild type IgG1 hinge comprising the following aa sequence:

(SEQ ID NO: 4)
EPKSCDKTHTCPPCPAPELLG.

[0267] The first and/or the second hinge of a TFcBA may also consist of an IgG1 hinge comprising up to 1, 2, 3, 4, or 5 aa modifications, e.g., aa substitutions, deletions or additions, relative to SEQ ID NO:4. For example, the following IgG1 hinges may be used:

EPKSCDKTCCCPPCPAPELLG (SEQ ID NO:18; corresponds to SEQ ID NO:4 with the aa substitutions H224C and T225C); and
[sequence omitted] (SEQ ID NO:19; corresponds to SEQ ID NO: 4 with the aa substitution T223C).

[0268] In one embodiment, the first and/or the second hinge of a TFcA is a hybrid hinge, i.e., a hinge that comprises portions from different IgG subclasses. In one embodiment, a hinge comprises an upper hinge from IgG1 and a middle and lower hinge from IgG4, and may, e.g., consist of the following aa sequence:

[0269] [sequence omitted] (SEQ ID NO:20; upper case residues represents IgG1 sequences and lower case residues represent IgG4 sequences).

[0270] The first and/or the second hinge of a TFcBA may also be a hybrid hinge comprising the aa sequence set forth in SEQ ID NO:20, comprising up to 1, 2, 3, 4, or 5 aa modifications, e.g., aa substitutions, deletions or additions. For example, the following IgG1/IgG4 hybrid hinges may be used:

[0271] EPKSCDKTCCcpscpapeflg (SEQ ID NO:21; corresponds to SEQ ID NO:20 with the aa substitutions H224C and T225C; upper case residues represent IgG1 sequences and lower case residues represent IgG4 sequences); and

[0272] EPKSCDKCHTcpscpapeflg (SEQ ID NO:22; corresponds to SEQ ID NO:20 with the aa substitution T223C).

[0273] In certain embodiments, the first and/or the second Fc region comprises a portion of a hinge instead of a full length hinge. For example, a first and/or a second Fc region of a TFcBA may comprise a hinge lacking the upper, middle and/or lower hinge. In certain embodiments, an Fc region comprises a middle and lower hinge, but does not comprise an upper hinge. An exemplary aa sequence of an IgG1 middle and lower hinge is the following:

(SEQ ID NO: 23)
CPPCPAPELLG.

[0274] An exemplary aa sequence of an IgG4 middle and lower hinge is the following:

(SEQ ID NO: 24)
CPSCPAPEFLG.

[0275] A summary of the aa numbers of the hinges and portions thereof provided above is set forth in Table 4. Alignments of the IgG1 and IgG1/IgG4 hybrid hinges are set forth in FIG. 2.

TABLE 4
SEQ ID NOs of exemplary
hinges and sub domains thereof

| | | | IgG1/IG4 |
|---|---|---|---|
| | | | hybrid |
| | IgG1 | IgG4 | hinge |
| Upper | SEQ ID | SEQ ID | SEQ ID |
| hinge | NO: 1 | NO: 12 | NO: 1 |
| Upper | SEQ ID | — | SEQ ID |
| hinge with | NO: 16 | | NO: 16 |
| H224C/T225C | | | |
| Upper hinge | SEQ ID | — | SEQ ID |
| with T223C | NO: 17 | | NO: 17 |
| Middle | SEQ ID | SEQ ID | SEQ ID |
| hinge | NO: 2 | NO: 13 | NO: 13 |
| Lower | SEQ ID | SEQ ID | SEQ ID |
| hinge | NO: 3 | NO: 14 | NO: 14 |
| Middle and | SEQ ID | SEQ ID | SEQ ID |
| lower hinge | NO: 23 | NO: 24 | NO: 24 |
| Complete | SEQ ID | SEQ ID | SEQ ID |
| hinge | NO: 4 | NO: 15 | NO: 20 |
| Complete | SEQ ID | — | SEQ ID |
| hinge with | NO: 18 | | NO: 21 |
| H224C/T225C | | | |
| Complete | SEQ ID | — | SEQ ID |
| hinge | NO: 19 | | NO: 22 |
| with T223C | | | |

[0276] Cysteines may also be introduced at positions other than T223, H224 and T225 in a hinge, e.g., by the substitution K222C, described in WO2010/064090.

[0277] Additional hinges that may be used in TFcAs include hIgG1 hinge variants comprising one of the following aa sequences (FIG. 2):

(SEQ ID NO: 263; hIgG1 Extra Prolines v1)
PPPPCDKTHTCPPCP
(SEQ ID NO: 264; hIgG1 Extra Prolines v2)
EPKSCPPPCPPCP
(SEQ ID NO: 265; hIgG1-like double core)
EPKSCPPCPCPPCP

[0278] Hinges that may be used in TFcAs may also include mouse hinge sequences, e.g., mIgG1 and mIgG2 sequences, and hybrids thereof. An exemplary mIgG1/mIgG2A hinge comprises the aa sequence

### VPRDCTIKPCPPCP (SEQ ID NO:267).

[0279] Other hinges that may be used in TFcAs comprise an IgG2 hinge or variant thereof, such as a variant comprising one of the following amino acid sequences (FIG. 2):

(SEQ ID NO: 268; hIgG2 C232P)
ERKPCVECPPCP
(SEQ ID NO: 269; hIgG2 C233P)
ERKCPVECPPCP

[0280] In certain embodiments, a TFcA comprises an IgA, e.g., IgA2, hinge or variant thereof. Exemplary IgA2 hinge variants include those comprising one of the following aa sequences (FIG. 2):

(SEQ ID NO: 271; hIgA2 Modified v1)
EPKSCPCPPPPPCCP
(SEQ ID NO: 272; hIgA2 modified v2)
EPKSCPCPPPPCCP
(SEQ ID NO: 273; hIgA2 Modified v3)
EPKSCPVPPPPPCCP

[0281] Other variations, e.g., aa modifications, may also be introduced into a hinge. For example, the substitution S228P may be made in the middle hinge of IgG4 to stabilize the interaction between two Fc regions comprising IgG4 middle hinges.

[0282] A TFcA comprising IgG2 sequences in its Fab domain may comprise the mutation C129S in the heavy chain portion of the Fab domain, which is a mutation of the cysteine that normally links the heavy chain to the light chain. Such a mutation will encourage the formation of a disulfide bridge between the light chain cysteine and C232 in the heavy chain, and C233 will pair with C233 of the neighboring hinge (in addition to the two disulfides in the CPPCP motif).

[0283] In certain embodiments, the following variant hinges are used: PRDCGCKPCICT (SEQ ID NO:248), PKSCGCKPCICT (SEQ ID NO:249), PKSCGCKPCICP (SEQ ID NO:250), PRDCGCKPCPPCP (SEQ ID NO:251), PRDCGCHTCPPCP (SEQ ID NO:252), PKSCDCHCPPCP (SEQ ID NO:253), and RKCCVECPPCP (SEQ ID NO:254).

[0284] In certain embodiments, a TFcBA does not comprise a first or a second hinge. For example, instead of a first hinge, a TFcBA may comprise a connecting linker that links the first binding site to the first CH2 domain. Such a linker may be a Gly-Ser linker as further described herein in the context of TFc linkers. In certain embodiments, a connecting linker comprises a (G₄S) 2 or (G₄S)₃ or (G₄S)₄ sequence. Other peptide sequences may also be used as a connecting linker provided that they provide the required flexibility and rigidity of certain parts of the linker. In certain embodiments, a TFcBA does not comprise a second hinge, but comprises a connecting linker instead, which may be a Gly-Ser linker similar to that of the TFc linker.

### Exemplary CH2 Domains

[0285] In certain embodiments, an Fc region comprises a CH2 domain. A CH2 domain may be from a human IgG1, IgG2, IgG3 or IgG4 or from a combination thereof (a “hybrid” CH2 domain). An exemplary full length wild type IgG1 CH2 domain consists of the following aa sequence:

(SEQ ID NO: 261)
GPSVFLFPPKPKDTLMISRTPEVTCVVVDVSHEDPEVKFNVVYVDG
VEVHNAKTKPREEQYNSTYRVVSVLTVLHQDWLNGKEYKCKVSNKA
LPAPIEKTISKAK.

[0286] An exemplary full length IgG1 CH2 domain with an N297Q substitution to reduce the glycosylation at that residue, such that the variant is substantially aglycosylated when expressed in a mammalian cell, consists of the following amino acid sequence:

(SEQ ID NO: 25)
GPSVFLFPPKPKDTLMISRTPEVTCVVVDVSHEDPEVKFNVVYVDG
VEVHNAKTKPREEQYQSTYRVVSVLTVLHQDWLNGKEYKCKVSNKA
LPAPIEKTISKAK.

[0287] An exemplary full length wild type IgG4 CH2 domain comprises the following aa sequence:

(SEQ ID NO: 262)
GPSVFLFPPKPKDTLMISRTPEVTCVVVDVSQEDPEVQFNVVYVDG
VEVHNAKTKPREEQFNSTYRVVSVLTVLHQDWLNGKEYKCKVSNKG
LPSSIEKTISKAK.

[0288] An exemplary full length IgG4 CH2 domain with a T299K substitution to reduce the glycosylation at residue 297, such that the variant is substantially aglycosylated when expressed in a mammalian cell, consists of the following amino acid sequence:

(SEQ ID NO: 26)
GPSVFLFPPKPKDTLMISRTPEVTCVVVDVSQEDPEVQFNVVYVDG
VEVHNAKTKPREEQFNSKYRVVSVLTVLHQDWLNGKEYKCKVSNKG
LPSSIEKTISKAK.

[0289] A CH2 domain may also comprise an aa sequence that differs from that of IgG1, IgG2, IgG3 or IgG4 in one or more aa modifications, e.g., aa deletions, additions or substitutions. In certain embodiments, a CH2 domain comprises an aa sequence that differs from that of a naturally occurring (or wild type) CH2 domain (e.g., SEQ ID NO:261 and 262) or from SEQ ID NOs:25 or 26 in at most, 1, 2, 3, 4, 5, 6, 7, 8, 9, 10, 15, 20, 25 or 30 aas. In certain embodiments, a CH2 domain comprises an aa sequence that is at least 70%, 75%, 80%, 85%, 90%, 95%, 97%, 98% or 99% identical or similar to that of a naturally occurring CH2 domain (e.g., SEQ ID NO:261 and 262) or SEQ ID NOs:25 or 26. Exemplary modifications include other modifications to reduce or remove glycosylation at aa 297. A modification may generally comprise an amino acid substitution in any of EU positions 297-299 (aa motif NXT) such that the variant is substantially aglycosylated when expressed in a mammalian cell. In addition to T299K, other substitutions that may be made at aa 299 to reduce glycosylation at aa 297 include T299S, T299A, T299N, T299G, T299Y, T299C, T299H, T299E, T299D, T299R, T299G, T299I, T299L, T299M, T299F, T299P, T299W, and T299V, as described, e.g., in WO/2005/018572.

[0290] Other aa changes may affect antibody effector functions, e.g., ADCC and CDC, or stability or other desired antibody characteristic. For example, FcγRI binding to an IgG1 Fc region may be modulated by modifying Leu235 and/or G1y237. Binding to Clq for CDC may be modulated by substitution of Ala330 and/or Pro331. Other modifications that may be made to CH2 domains to modulate the effector functions include substitutions at one or more aas at positions 234 to 238, 253, 279, 310, 318, 320, and 322.

### Exemplary CH3 Domains

[0291] In certain embodiments, the first and/or the second Fc region of a TFcA, e.g., a TFcBA, comprises a CH3 domain. A CH3 domain may be from a human immunoglobulin, e.g., an IgG1, IgG2, IgG3 or IgG4, or from a combination thereof (a “hybrid” CH3 domain). An exemplary full length wild type IgG1 CH3 domain comprises the following aa sequence:

(SEQ ID NO: 27)
GQPREPQVYTLPPSRDELTKNQVSLTCLVKGFYPSDIAVEWESNGQ
PENNYKTTPPVLDSDGSFFLYSKLTVDKSRWQQGNVFSCSVMHEAL
HNHYTQKSLSLSPGK.

[0292] In certain embodiments, variations of SEQ ID NO:27 may be used. For example, the C-terminal lysine of the CH3 domain may be deleted (see SEQ ID NO:28 in FIG. 3). In other embodiments, a CH3 domain comprises the aa substitutions D356E and L358M and the C-terminal lysine may be present or absent (SEQ ID Nos:29 and 30 respectively, and shown in FIG. 3).

[0293] In certain embodiments, the first and/or the second CH3 domains of a TFcA are modified to enhance the association of the first and the second Fc comprising the first and the second CH3 domains, respectively. Such CH3 modifications are referred to herein as Association Enhancing Modifications (“AEMs”). As further described in the Examples, it has been unexpectedly found that the addition of a TFc linker joining the two Fc regions of an Ab further enhances the ability of Abs having AEMs to properly assemble and increases their stability.

[0294] Exemplary AEM modifications that can be used are modifications that create “knobs-into-holes” and which are described, e.g., in U.S. Pat. No. 7,183,076. In this strategy, the CH3 domains are engineered to give one a protruding “knob” or “bump” and the other a complementary “hole,” thereby favoring the association of the CH3 domains. An exemplary aa modification to a CH3 domain that creates a “hole” is the combination of aa substitutions T366S, L368A and Y407V (e.g., in SEQ ID NOs:31-34; FIG. 3). Such a CH3 domain with a “hole” will dimerize favorably with a CH3 domain having a “knob” or “bump,” e.g., a CH3 domain comprising the amino acid substitution T366W (e.g., in SEQ ID NOs:35-38; FIG. 3). This pair of knob/hole mutations is referred to herein as “AEM module 1” or “AEM 1,” of which the first and the second CH3 domains are referred to as “AEM 1.1” and “AEM 1.2,” respectively.

[0295] In another embodiment, one of the two CH3 domains of a TFcA comprises a hole created by the substitution Y407T (e.g., in SEQ ID NOs:39-42; FIG. 3) and the other CH3 domain comprises a knob created by the substitution T366Y (e.g., in SEQ ID NOs:43-46; FIG. 3). This second pair of knob/hole mutations is referred to as “AEM module 2” or “AEM 2,” of which the first and the second CH3 domains are referred to as “AEM 2.1” and “AEM 2.2,” respectively.

[0296] The association between two CH3 domains may also be enhanced by mechanisms other than those creating typical knob/holes, e.g., by electrostatic modifications. In one embodiment, one of the two CH3 domains of a TFcA comprises the combination of substitutions S364H and F405A (e.g., in SEQ ID NOs:47-50; FIG. 3) and the other CH3 domain comprises the combination of substitutions Y349T and T394F (e.g., in SEQ ID NOs:51-54; FIG. 3). This third pair of modifications is referred to herein as “AEM module 3” or “AEM 3,” of which the first and the second CH3 domains are referred to as “AEM 3.1” and “AEM 3.2,” respectively.

[0297] In one embodiment, one of the two CH3 domains of a TFcA comprises the combination of substitutions K370D, K392D and K409D (e.g., in SEQ ID NOs:55-58; FIG. 3) and the other CH3 domain comprises the combination of substitutions E(or D)356K, E357K and D399K (e.g., in SEQ ID NOs:59-62; FIG. 3). This fourth pair of modifications is referred to herein as “AEM module 4” or “AEM 4,” of which the first and the second CH3 domains are referred to as “AEM 4.1” and “AEM 4.2,” respectively. The aa at position 356 may be either an E or a D, depending on the sequence that is used, and therefore the substitution at that position is referred to as “E (or D)356.”

[0298] In certain embodiments, the first and/or the second CH3 domains of a TFcA comprise one or more aa modifications resulting in the addition of one or more Cysteines that allow the formation of one or more disulfide bonds between the two CH3 or Fc domains. In one embodiment, one of the two CH3 domains of a TFcA comprises the substitution Y349C (e.g., in SEQ ID NOs:63-66; FIG. 3) and the other CH3 domain comprises the substitution S354C (e.g., in SEQ ID NOs:67-70; FIG. 3). This pair of disulfide forming modifications is referred to herein as “DiS module 1” or “DiS 1,” of which the first and the second CH3 domains are referred to as “DiS 1.1” and “DiS 1.2,” respectively.

[0299] In other embodiments, a cysteine is added to the C-terminus of each of the two CH3 domains of a TFcA, to thereby form a disulfide bond between the two CH3 domains. For example, one of the two CH3 domains may comprise the substitution of the carboxyl terminal aas “PGK” with “KSCDKT” (e.g., in SEQ ID NOs:71-72; FIG. 3) and the other CH3 domain may comprise the substitution of the carboxyl-terminal aas “PGK” with “GEC” (e.g., in SEQ ID NOs:73-74; FIG. 3).

[0300] In certain embodiments, a CH3 domain comprises a combination of two or more aa change(s). For example, one or more AEMs may be combined with one or more DiS modifications. In an exemplary embodiment, a CH3 domain comprises the hole mutations T366S, L368A, Y407V and the disulfide bond generating mutation Y349C (AEM 1.1+DiS 1.1). Such a CH3 domain may be combined in a TFc with a CH3 domain comprising the knob mutation T366W and the disulfide bond generating mutation 5354C (AEM 1.2+DiS 1.2). Exemplary aa sequences comprising this combination of substitutions include SEQ ID NOs:75-82 (FIG. 3).

[0301] Exemplary combinations of AEMs and DiSs that are made in CH3 domains to favor the association of CH3 domains or Fc regions comprising these are set forth in Table 5, wherein a “yes” indicates a combination that may be used.

TABLE 5
Exemplary combinations of AEM and DiS modifications

| | | | AEM module 1 | | | | | | AEM module 4 | |
|---|---|---|---|---|---|---|---|---|---|---|
| | | | 1.1 | | | | AEM module 3 | | 4.1 | 4.2 |
| | | | T366S/ | | AEM module 2 | | 3.1 | 3.2 | K370D/ | D356K*/ |
| | | | L368A/ | 1.2 | 2.1 | 2.2 | S364H/ | Y349T/ | K392D/ | E357K/ |
| | | | Y470V | T366W | Y407T | T366Y | F405A | T394F | K409D | D399K |
| DiS 1 | 1.1 | Y349C | yes | yes | yes | yes | yes | yes | yes | yes |
| | 1.2 | S354C | yes | yes | yes | yes | yes | yes | yes | yes |
| DiS 2 | 2.1 | C. term. | yes | yes | yes | yes | yes | yes | yes | yes |
| | | KSCDKT | | | | | | | | |
| | 2.2 | C term. | yes | yes | yes | yes | yes | yes | yes | yes |
| | | GEC | | | | | | | | |

*With respect to the sequences that have an E at position 356 (e.g., SEQ ID NOs: 29 and 30), this mutation is E356K.

[0302] Aa sequences of exemplary IgG1 CH3 domains with an AEM and/or DiS comprise SEQ ID NOs:31-98. An alignment of these aa sequences is provided in FIG. 3, and a description of these sequences is provided in Table 6. The CH3 domains in Table 6 and FIG. 3 are organized according to their AEM module (number 1, 2, 3 or 4) and their DiS module (number 1 or 2). Compatible CH3 domains are listed as “1” and “2” preceded by the module number.

TABLE 6
SEQ ID NOs for IgG1 CH3 domains with an AEM and/or a DiS

| | | | | | Wild type with |
|---|---|---|---|---|---|
| | | | | | D356E and |
| | | | | | L358M; |
| | | | Wild type without | Wild type with | without a |
| | | Wild type | terminal lysine | D356E and L358M | terminal lysine |
| | — | SEQ ID | SEQ ID NO:28 | SEQ ID NO:29 | SEQ ID NO:30 |
| | | NO:27 | | | |
| AEM | AEM 1.1 T366S/L368A/ | SEQ ID | SEQ ID NO:32 | SEQ ID NO:33 | SEQ ID NO:34 |
| 1 | Y407V | NO:31 | | | |
| | AEM 1.2 T366W | SEQ ID | SEQ ID NO:36 | SEQ ID NO:37 | SEQ ID NO:38 |
| | | NO:35 | | | |
| AEM | AEM 2.1 Y407T | SEQ ID | SEQ ID NO:40 | SEQ ID NO:41 | SEQ ID NO:42 |
| 2 | | NO:39 | | | |
| | AEM 2.2 T366Y | SEQ ID | SEQ ID NO:44 | SEQ ID NO:45 | SEQ ID NO:46 |
| | | NO:43 | | | |
| AEM | AEM 3.1 S364H/F405A | SEQ ID | SEQ ID NO:48 | SEQ ID NO:49 | SEQ ID NO:50 |
| 3 | | NO:47 | | | |
| | AEM 3.2 Y349T/T394F | SEQ ID | SEQ ID NO:52 | SEQ ID NO:53 | SEQ ID NO:54 |
| | | NO:51 | | | |
| AEM | AEM 4.1 K370D/K392D/ | SEQ ID | SEQ ID NO:56 | SEQ ID NO:57 | SEQ ID NO:58 |
| 4 | K409D | NO:55 | | | |
| | AEM 4.2 D356K*/E357K/ | SEQ ID | SEQ ID NO:60 | SEQ ID NO:61 | SEQ ID NO:62 |
| | D399K | NO:59 | | | |
| DiS 1 | DiS 1.1 Y349C | SEQ ID | SEQ ID NO:64 | SEQ ID NO:65 | SEQ ID NO:66 |
| | | NO:63 | | | |
| | DiS 1.2 S354C | SEQ ID | SEQ ID NO:68 | SEQ ID NO:69 | SEQ ID NO:70 |
| | | NO:67 | | | |
| DiS 2 | DiS 2.1 | SEQ ID | — | SEQ ID NO:72 | — |
| | C. term. KSCDKT | NO:71 | | | |
| | DiS 2.2 | SEQ ID | — | SEQ ID NO:74 | — |
| | C. term. GEC | NO:73 | | | |
| AEM | AEM 1.1 + DiS 1.1 | SEQ ID | SEQ ID NO:76 | SEQ ID NO:77 | SEQ ID NO:78 |
| 1 + | Y349C/T366S/ | NO:75 | | | |
| DiS 1 | L368A/Y407V | | | | |
| | AEM 1.2 + DiS 1.2 | SEQ ID | SEQ ID NO:80 | SEQ ID NO:81 | SEQ ID NO:82 |
| | S354C/T366W | NO:79 | | | |
| AEM | AEM 1.1 + DiS 2.1 | SEQ ID | — | SEQ ID NO:84 | — |
| 1 + | T366S/L368A/ | NO:83 | | | |
| DiS 2 | Y407V/C. term. KSCDKT | | | | |
| | AEM 1.2 + DiS 2.2 | SEQ ID | — | SEQ ID NO:86 | — |
| | T366W/C term. GEC | NO:85 | | | |
| AEM | AEM 1.1 + DiS 2.2 | SEQ ID | — | SEQ ID NO:88 | — |
| 1 + | T366S/L368A/ | NO:87 | | | |
| DiS | Y407V/C term. GEC | | | | |
| 2Inv | AEM 2.1 + DiS 2.1 | SEQ ID | — | SEQ ID NO:90 | — |
| | T366W/C. term. KSCDKT | NO:89 | | | |
| AEM | AEM 3.1 + DiS 2.1 | SEQ ID | — | SEQ ID NO:92 | — |
| 3 + | S364H/F405A/C term. | NO:91 | | | |
| DiS 2 | KSCDKT | | | | |
| | AEM 3.2 + DiS 2.2 | SEQ ID | — | SEQ ID NO:94 | — |
| | Y349T/T394F/C term. GEC | NO:93 | | | |
| AEM | AEM 4.1 + DiS 2.1 | SEQ ID | — | SEQ ID NO:96 | — |
| 4 + | K370D/K392D/ | NO:95 | | | |
| DiS 2 | K409D/C. term. KSCDKT | | | | |
| | AEM 4.2 + DiS 2.2 | SEQ ID | — | SEQ ID NO:98 | — |
| | D356K*/E357K/ | NO:97 | | | |
| | D399K/C term. GEC | | | | |

*With respect to the sequences that have an E at position 356 (e.g., SEQ ID NOs:29 and 30), this mutation is E356K.

[0303] Other CH3 AEMs that may be used in TFcAs include the following pairs of aa modifications, wherein the substitution(s) to the first and the second member of a pair of AEM modifications are separated by “and”:

1) F405A and T394E; S364D and Y349K; S364E and L368K; S364E Y349K; S364F and K3700; S364H and Y349K; S364H and Y349T; S364Y and K370G; T411K and K370E; V397S/F405A and T394F; K370/T411K and K370E/T411E; L351E/S364D and Y349K/L351K; L351E/S364E and Y349K/L351K; L351E/T366D and L351K/F366K; P395T/V397S/F405A and T394E; S364D/K370G and S364Y/K370R; S364D/T394F and Y349K/F405A; S364E/F405A and Y349K/T394E; S364E/F405S and Y349K/T394Y; S364E/F411E and Y349K/D401K; S364H/D401K and Y349T/F411E; S364H/T394F and Y349T/F405A; Y349C/S364E and Y349K/S354C; L351E/S364D/F405A and Y349K/L351K/T394F; L351K/S364H/D401K and Y349T/L351E/T411E; S364E/T411E/F405A and Y349K/T394F/D401K; S364H/D401K/F405A and Y349T/T394F/T411E; S364H/F405A/T411E and Y349T/F394F/D401K (WO2011/028952).
2) T366W and Y407A; T366W and T366S; L368A and Y407Y; K409E and D399K; K409E and D399R; and K409D and D399K; K409D and D399; K392E and D399R; K392E and D399K; K392D and D399R; and K392D and D399R (WO2009/089004).
3) T366W and Y407A; F405A and T394W; Y407T and T366Y; T366Y/F405A and T394W/Y407T; T366W/F405W and T394S/Y407A; F405W/Y407A and T366W/T394S; and F405W and T394S (U.S. Pat. No. 7,642,228).

[0304] Generally, any other AEM or DiS described in the art may be used.

[0305] A CH3 domain may also comprise an aa sequence that differs from that of a CH3 aa sequence provided herein, e.g., SEQ ID NOs:27-98, in at most, 1, 2, 3, 4, 5, 6, 7, 8, 9, 10, 15, 20, or 30 aas. In certain embodiments, a CH3 domain comprises an aa sequence that is at least 70%, 75%, 80%, 85%, 90%, 95%, 97%, 98% or 99% identical to a CH3 aa sequence provided herein, e.g., SEQ ID NOs:27-98. As several antibody effector functions, e.g., ADCC and CDC are mediated at least in part through areas in CH3 domains, aa changes that can be made to CH3 domains include changes affecting the effector function(s) of Fc regions. Exemplary modifications that may be made to CH3 domains are further described herein.

### Exemplary Fc Regions

[0306] An Fc region of a TFcA comprises one or more of a hinge, CH2 domain, CH3 domain and CH4 domain, which may be full length or not and which may be wild type or with aa modifications. The Fc domains may be from human immunoglobulins (“Igs”) or non-human Igs, e.g., mouse Igs, and may be from any type or isotype of an Ig, such as an IgG (e.g., IgG1, IgG2, IgG3 and IgG4) or IgA (e.g., IgA1 and IgA2).

[0307] In certain embodiments, a TFcA comprises a TFc that comprises a first and/or a second Fc region from a human immunoglobulin, e.g., IgG1. An Fc region preferably comprises in a contiguous amino to carboxyl terminal order: an IgG1 hinge or portion thereof (e.g., a core and lower hinge), an IgG1 CH2 domain and an IgG1 CH3 domain. Fc regions may comprise any combination of an IgG1 hinge (or portion thereof), IgG1 CH2 domain and IgG1 CH3 domains set forth herein, provided that the TFcA has the desired activity and stability.

[0308] In certain embodiments, a TFc comprises a first and/or a second Fc region that is a hybrid Fc region. A hybrid Fc region may comprise Fc domains from two or more IgG subclasses IgG1, IgG2, IgG3 and IgG4. In one embodiment, a hybrid Fc region comprises in a contiguous amino to carboxyl terminal order: an IgG1 upper hinge, an IgG4 middle and lower hinge, an IgG4 CH2 domain and an IgG1 CH3 domain. Exemplary IgG1/IgG4 hybrid Fc regions may comprise any combination of an IgG1 upper hinge, IgG4 core hinge, IgG4 lower hinge, IgG 4 CH2 domain and IgG1 CH3 domains set forth herein, provided that the TFcA comprising the TFc has the desired activity and stability.

[0309] In certain embodiments, an Fc region does not comprise a full length hinge. For example, a TFcBA may comprise a first Fc region comprising a full length hinge and a second Fc region comprising a hinge that consists of the core and/or lower hinge and does not comprise an upper hinge.

[0310] In certain embodiments, a TFc comprises a hinge that has been modified to comprise a cysteine for forming a disulfide bond with another cysteine in the other Fc region, to thereby stabilize the TFc. In one embodiment, an IgG1 hinge comprises the substitutions H224C and T225C (e.g., SEQ ID NO:18; FIG. 2). In another embodiment, a hinge comprises the substitution T223C (e.g., SEQ ID NO: 19; FIG. 2).

[0311] In one embodiment, a TFcA comprises an IgG1 TFc comprising in amino to carboxyl terminal order: i) an IgG1 hinge selected from the group of hinges consisting of the aa sequences set forth in SEQ ID NO:4 (full length IgG1 hinge), SEQ ID NO:18 (SEQ ID NO:4 with H224C/T225C), SEQ ID NO:19 (SEQ ID NO:4 with T223C) and SEQ ID NO:23 (middle and lower IgG1 hinge only); ii) an IgG1 CH2 domain comprising SEQ ID NO:261 or 25; and iii) a CH3 domain comprising an aa sequence selected from the group of CH3 domains consisting of an aa sequence set forth in SEQ ID NOs:31-98 (FIG. 3). In another embodiment, a TFcA comprises an IgG1/IgG4 hybrid TFc comprising in amino to carboxyl terminal order: i) a hinge selected from the group of hinges consisting of an aa sequence set forth in SEQ ID NO:20 (IgG1 upper hinge and IgG4 core and lower hinge), SEQ ID NO:21 (SEQ ID NO:20 with H224C/T225C), SEQ ID NO:22 (SEQ ID NO:20 with T223C) and SEQ ID NO:24 (middle and lower IgG4 hinge only); ii) an IgG4 CH2 domain comprising SEQ ID NO:262 or 26; and iii) a CH3 domain comprising an aa sequence selected from the group of CH3 domains consisting of the aa sequences SEQ ID NOs:31-98 (FIG. 3). Exemplary combinations of hinges and CH3 domains are set forth in Table 7, wherein a “yes’ indicates a combination that may be used, and wherein compatible modifications are separated from others by a blank row.

TABLE 7
Exemplary combinations of hinges and CH3 domains for forming Fc regions

| | | Hinge | | | | | | | |
|---|---|---|---|---|---|---|---|---|---|
| | | | IgG1 | IgG1 | Partial | | Hybrid | Hybrid | Partial |
| | | IgG1 | H224C/T225C | T223C | IgG1 | Hybrid | H224C/T225C | T223C | IgG4 |
| | | SEQ ID | SEQ ID | SEQ ID | SEQ ID | SEQ ID | SEQ ID | SEQ ID | SEQ ID |
| | | NO: 1 | NO: 18 | NO: 19 | NO: 23 | NO: 20 | NO: 21 | NO: 22 | NO: 24 |
| CH3 | AEM 1.1 | yes | yes | yes | yes | yes | yes | yes | yes |
| | SEQ ID | | | | | | | | |
| | NOs: 31-34 | | | | | | | | |
| | AEM 1.2 | yes | yes | yes | yes | yes | yes | yes | yes |
| | SEQ ID | | | | | | | | |
| | NOs: 35-38 | | | | | | | | |
| | AEM 2.1 | yes | yes | yes | yes | yes | yes | yes | yes |
| | SEQ ID | | | | | | | | |
| | NOs: 39-42 | | | | | | | | |
| | AEM 2.2 | yes | yes | yes | yes | yes | yes | yes | yes |
| | SEQ ID | | | | | | | | |
| | NOs: 43-46 | | | | | | | | |
| | AEM 3.1 | yes | yes | yes | yes | yes | yes | yes | yes |
| | SEQ ID | | | | | | | | |
| | NOs: 47-50 | | | | | | | | |
| | AEM 3.2 | yes | yes | yes | yes | yes | yes | yes | yes |
| | SEQ ID | | | | | | | | |
| | NOs: 51-54 | | | | | | | | |
| | AEM 4.1 | yes | yes | yes | yes | yes | yes | yes | yes |
| | SEQ ID | | | | | | | | |
| | NOs: 55-58 | | | | | | | | |
| | AEM 4.2 | yes | yes | yes | yes | yes | yes | yes | yes |
| | SEQ ID | | | | | | | | |
| | NOs: 59-62 | | | | | | | | |
| | DiS 1.1 | yes | yes | yes | yes | yes | yes | yes | yes |
| | SEQ ID | | | | | | | | |
| | NOs: 63-66 | | | | | | | | |
| | DiS 1.2 | yes | yes | yes | yes | yes | yes | yes | yes |
| | SEQ ID | | | | | | | | |
| | Nos: 67-70 | | | | | | | | |
| | DiS 2.1 | yes | yes | yes | yes | yes | yes | yes | yes |
| | SEQ ID | | | | | | | | |
| | NOs: 71-72 | | | | | | | | |
| | DiS 2.2 | yes | yes | yes | yes | yes | yes | yes | yes |
| | SEQ ID | | | | | | | | |
| | NOs: 73-74 | | | | | | | | |
| | AEM 1.1 | yes | yes | yes | yes | yes | yes | yes | yes |
| | DiS 1.1 | | | | | | | | |
| | SEQ ID | | | | | | | | |
| | NOs: 75-78 | | | | | | | | |
| | AEM 1.2 | yes | yes | yes | yes | yes | yes | yes | yes |
| | DiS 1.2 | | | | | | | | |
| | SEQ ID | | | | | | | | |
| | NOs: 79-82 | | | | | | | | |
| | AEM 1.1 | yes | yes | yes | yes | yes | yes | yes | yes |
| | DiS 2.1 | | | | | | | | |
| | SEQ ID | | | | | | | | |
| | NOs: 83-84 | | | | | | | | |
| | AEM 1.2 | yes | yes | yes | yes | yes | yes | yes | yes |
| | DiS 2.2 | | | | | | | | |
| | SEQ ID | | | | | | | | |
| | NOs: 85-86 | | | | | | | | |
| | AEM 1.1 | yes | yes | yes | yes | yes | yes | yes | yes |
| | DiS 2.2 | | | | | | | | |
| | SEQ ID | | | | | | | | |
| | NOs: 87-88 | | | | | | | | |
| | AEM 1.2 | yes | yes | yes | yes | yes | yes | yes | yes |
| | DiS 2.1 | | | | | | | | |
| | SEQ ID | | | | | | | | |
| | NOs: 89-90 | | | | | | | | |
| | AEM 3.1 | yes | yes | yes | yes | yes | yes | yes | yes |
| | DiS 2.1 | | | | | | | | |
| | SEQ ID | | | | | | | | |
| | NOs: 91-92 | | | | | | | | |
| | AEM 3.2 | yes | yes | yes | yes | yes | yes | yes | yes |
| | DiS 2.2 | | | | | | | | |
| | SEQ ID | | | | | | | | |
| | NOs: 93-94 | | | | | | | | |
| | AEM 4.1 | yes | yes | yes | yes | yes | yes | yes | yes |
| | DiS 2.1 | | | | | | | | |
| | SEQ ID | | | | | | | | |
| | NOs: 95-96 | | | | | | | | |
| | AEM 4.2 | yes | yes | yes | yes | yes | yes | yes | yes |
| | DiS 2.2 | | | | | | | | |
| | SEQ ID | | | | | | | | |
| | NOs: 97-98 | | | | | | | | |

[0312] In one embodiment, a TFcA comprises a TFc that comprises an IgG1 Fc region comprising a hinge comprising SEQ ID NO:4, a CH2 domain comprising SEQ ID NO:25 and a CH3 domain comprising SEQ ID NO:29, and may form, e.g., an IgG1 Fc region comprising SEQ ID NO:99 (see Table 8 and FIG. 4). Other combinations of IgG1 hinges, IgG1 CH2 domain, and IgG1 CH3 domains and exemplary IgG1 Fcs created by such combinations are provided in Table 8. The aa sequences of the exemplary IgG1 Fcs listed in Table 8 (SEQ ID NOs:99-132) are provided in FIG. 4. Compatible IgG1 Fcs in Table 8 are separated from other IgG1 Fcs by a blank row.

TABLE 8
SEQ ID NOs of exemplary combinations of IgG1 hinges, CH2 domain and CH3 domain
forming exemplary IgG1 Fcs

| IgG1 Hinge | IgG1 CH2 | IgG1 CH3 | IgG1 Fc |
|---|---|---|---|
| SEQ ID NO:4 | SEQ ID NO:25 | SEQ ID NO:29 | SEQ ID NO:99 |
| SEQ ID NO:23 | SEQ ID NO:25 | SEQ ID NO:29 | SEQ ID NO:100 |
| SEQ ID NO:4 | SEQ ID NO:25 | SEQ ID NO:33 | SEQ ID NO:101 |
| SEQ ID NO:23 | SEQ ID NO:25 | SEQ ID NO:37 | SEQ ID NO:102 |
| SEQ ID NO:4 | SEQ ID NO:25 | SEQ ID NO:37 | SEQ ID NO:103 |
| SEQ ID NO:23 | SEQ ID NO:25 | SEQ ID NO:33 | SEQ ID NO:104 |
| SEQ ID NO:4 | SEQ ID NO:25 | SEQ ID NO:77 | SEQ ID NO:105 |
| SEQ ID NO:23 | SEQ ID NO:25 | SEQ ID NO:81 | SEQ ID NO:106 |
| SEQ ID NO:4 | SEQ ID NO:25 | SEQ ID NO:81 | SEQ ID NO:107 |
| SEQ ID NO:23 | SEQ ID NO:25 | SEQ ID NO:77 | SEQ ID NO:108 |
| SEQ ID NO:4 | SEQ ID NO:25 | SEQ ID NO:41 | SEQ ID NO:109 |
| SEQ ID NO:23 | SEQ ID NO:25 | SEQ ID NO:45 | SEQ ID NO:110 |
| SEQ ID NO:4 | SEQ ID NO:25 | SEQ ID NO:45 | SEQ ID NO:111 |
| SEQ ID NO:23 | SEQ ID NO:25 | SEQ ID NO:41 | SEQ ID NO:112 |
| SEQ ID NO:4 | SEQ ID NO:25 | SEQ ID NO:33 | SEQ ID NO:113 |
| SEQ ID NO:23 | SEQ ID NO:25 | SEQ ID NO:77 | SEQ ID NO:114 |
| SEQ ID NO:4 | SEQ ID NO:25 | SEQ ID NO:33 | SEQ ID NO:115 |
| SEQ ID NO:23 | SEQ ID NO:25 | SEQ ID NO:77 | SEQ ID NO:116 |
| SEQ ID NO:4 | SEQ ID NO:25 | SEQ ID NO:84 | SEQ ID NO:117 |
| SEQ ID NO:23 | SEQ ID NO:25 | SEQ ID NO:86 | SEQ ID NO:118 |
| SEQ ID NO:4 | SEQ ID NO:25 | SEQ ID NO:86 | SEQ ID NO:119 |
| SEQ ID NO:23 | SEQ ID NO:25 | SEQ ID NO:84 | SEQ ID NO:120 |
| SEQ ID NO:4 | SEQ ID NO:25 | SEQ ID NO:88 | SEQ ID NO:121 |
| SEQ ID NO:23 | SEQ ID NO:25 | SEQ ID NO:90 | SEQ ID NO:122 |
| SEQ ID NO:4 | SEQ ID NO:25 | SEQ ID NO:90 | SEQ ID NO:123 |
| SEQ ID NO:23 | SEQ ID NO:25 | SEQ ID NO:88 | SEQ ID NO:124 |
| SEQ ID NO:4 | SEQ ID NO:25 | SEQ ID NO:92 | SEQ ID NO:125 |
| SEQ ID NO:23 | SEQ ID NO:25 | SEQ ID NO:94 | SEQ ID NO:126 |
| SEQ ID NO:4 | SEQ ID NO:25 | SEQ ID NO:94 | SEQ ID NO:127 |
| SEQ ID NO:23 | SEQ ID NO:25 | SEQ ID NO:92 | SEQ ID NO:128 |
| SEQ ID NO:4 | SEQ ID NO:25 | SEQ ID NO:96 | SEQ ID NO:129 |
| SEQ ID NO:23 | SEQ ID NO:25 | SEQ ID NO:98 | SEQ ID NO:130 |
| SEQ ID NO:4 | SEQ ID NO:25 | SEQ ID NO:98 | SEQ ID NO:131 |
| SEQ ID NO:23 | SEQ ID NO:25 | SEQ ID NO:96 | SEQ ID NO:132 |

In one embodiment, a TFcA comprises a TFc that comprises an IgG1/IgG4 Fc region comprising a hinge comprising SEQ ID NO:20, a CH2 domain comprising SEQ ID NO:26 and a CH3 domain comprising SEQ ID NO:29, and may form, e.g., an IgG1/IgG4 hybrid Fc region comprising SEQ ID NO:133 (see Table 9 and FIG. 4). Other combinations of IgG1/IgG4 hinges, IgG4 CH2 domain, and IgG1 CH3 domains and exemplary IgG1/IgG4 hybrid Fcs created by such combinations are provided in Table 9. The aa sequences of the exemplary IgG1/IgG4 hybrid Fcs listed in Table 9 (SEQ ID NOs:133-166) are provided in FIG. 5. Compatible IgG1 Fcs in Table 9 are separated from other IgG1 Fcs by a blank row.

TABLE 9
Exemplary combinations of IgG1/IgG4 hinges, CH2 domain and CH3 domain forming
exemplary IgG1/IgG4 hybrid Fcs

| Hinge | IgG4 CH2 | IgG1 CH3 | IgG1/IgG4 Fc |
|---|---|---|---|
| SEQ ID NO:20 | SEQ ID NO:26 | SEQ ID NO:29 | SEQ ID NO:133 |
| SEQ ID NO:24 | SEQ ID NO:26 | SEQ ID NO:29 | SEQ ID NO:134 |
| SEQ ID NO:20 | SEQ ID NO:26 | SEQ ID NO:33 | SEQ ID NO:135 |
| SEQ ID NO:24 | SEQ ID NO:26 | SEQ ID NO:37 | SEQ ID NO:136 |
| SEQ ID NO:20 | SEQ ID NO:26 | SEQ ID NO:37 | SEQ ID NO:137 |
| SEQ ID NO:24 | SEQ ID NO:26 | SEQ ID NO:33 | SEQ ID NO:138 |
| SEQ ID NO:20 | SEQ ID NO:26 | SEQ ID NO:77 | SEQ ID NO:139 |
| SEQ ID NO:24 | SEQ ID NO:26 | SEQ ID NO:81 | SEQ ID NO:140 |
| SEQ ID NO:20 | SEQ ID NO:26 | SEQ ID NO:81 | SEQ ID NO:141 |
| SEQ ID NO:24 | SEQ ID NO:26 | SEQ ID NO:77 | SEQ ID NO:142 |
| SEQ ID NO:20 | SEQ ID NO:26 | SEQ ID NO:41 | SEQ ID NO:143 |
| SEQ ID NO:24 | SEQ ID NO:26 | SEQ ID NO:45 | SEQ ID NO:144 |
| SEQ ID NO:20 | SEQ ID NO:26 | SEQ ID NO:45 | SEQ ID NO:145 |
| SEQ ID NO:24 | SEQ ID NO:26 | SEQ ID NO:41 | SEQ ID NO:146 |
| SEQ ID NO:20 | SEQ ID NO:26 | SEQ ID NO:33 | SEQ ID NO:147 |
| SEQ ID NO:24 | SEQ ID NO:26 | SEQ ID NO:77 | SEQ ID NO:148 |
| SEQ ID NO:20 | SEQ ID NO:26 | SEQ ID NO:33 | SEQ ID NO:149 |
| SEQ ID NO:24 | SEQ ID NO:26 | SEQ ID NO:77 | SEQ ID NO:150 |
| SEQ ID NO:20 | SEQ ID NO:26 | SEQ ID NO:84 | SEQ ID NO:151 |
| SEQ ID NO:24 | SEQ ID NO:26 | SEQ ID NO:86 | SEQ ID NO:152 |
| SEQ ID NO:20 | SEQ ID NO:26 | SEQ ID NO:86 | SEQ ID NO:153 |
| SEQ ID NO:24 | SEQ ID NO:26 | SEQ ID NO:84 | SEQ ID NO:154 |
| SEQ ID NO:20 | SEQ ID NO:26 | SEQ ID NO:88 | SEQ ID NO:155 |
| SEQ ID NO:24 | SEQ ID NO:26 | SEQ ID NO:90 | SEQ ID NO:156 |
| SEQ ID NO:20 | SEQ ID NO:26 | SEQ ID NO:90 | SEQ ID NO:157 |
| SEQ ID NO:24 | SEQ ID NO:26 | SEQ ID NO:88 | SEQ ID NO:158 |
| SEQ ID NO:20 | SEQ ID NO:26 | SEQ ID NO:92 | SEQ ID NO:159 |
| SEQ ID NO:24 | SEQ ID NO:26 | SEQ ID NO:94 | SEQ ID NO:160 |
| SEQ ID NO:20 | SEQ ID NO:26 | SEQ ID NO:94 | SEQ ID NO:161 |
| SEQ ID NO:24 | SEQ ID NO:26 | SEQ ID NO:92 | SEQ ID NO:162 |
| SEQ ID NO:20 | SEQ ID NO:26 | SEQ ID NO:96 | SEQ ID NO:163 |
| SEQ ID NO:24 | SEQ ID NO:26 | SEQ ID NO:98 | SEQ ID NO:164 |
| SEQ ID NO:20 | SEQ ID NO:26 | SEQ ID NO:98 | SEQ ID NO:165 |
| SEQ ID NO:24 | SEQ ID NO:26 | SEQ ID NO:96 | SEQ ID NO:166 |

[0313] Fc regions for use in TFcAs may also comprise aa sequences that differ from those described herein, e.g., SEQ ID NOs:99-166, in one or more aa modifications, e.g., aa deletions, additions or substitutions. In certain embodiments, an Fc region comprises an aa sequence that differs from a sequence set forth herein, e.g., from a sequence selected from the group consisting of SEQ ID NOs:99-166, in at most, 1, 2, 3, 4, 5, 6, 7, 8, 9, 10, 15, 20, 25, 30, 35, 40, 45 or 50 aas. In certain embodiments, an Fc region comprises an aa sequence that is at least 70%, 75%, 80%, 85%, 90%, 95%, 97%, 98% or 99% identical to that of a sequence set forth herein, e.g., a sequence selected from the group consisting of SEQ ID NOs:99-166. For example, the CH3 domain of an Fc region consisting of an aa sequence selected from the group consisting of SEQ ID NOs:99-166 may comprise a deletion of the C-terminal lysine and/or E356D and/or M358L. As several antibody effector functions, e.g., ADCC and CDC, are mediated through Fc regions, aa changes that can be made to Fc regions include changes affecting the effector function(s) of Fc regions. Exemplary mutations to these domains are set forth herein. Any of these aa modifications are permitted provided that the Fc region retains the desired properties, e.g., biological activity, stability and low immunogenicity.

### Exemplary Fc Modifications Affecting Effector Activity

[0314] TFcAs may comprise TFcs comprising aa modifications affecting the effector activity of Fc regions. Exemplary aa modifications are set forth below.

[0315] Replacements of aa residues in the Fc portion to alter antibody effector function are known in the art (see, e.g., U.S. Pat. Nos. 5,648,260 and 5,624,821). The Fc portion of an antibody mediates several important effector functions e.g., cytokine induction, antibody-dependent cellular cytotoxicity (“ADCC”), phagocytosis, complement dependent cytotoxicity (CDC) and half-life/clearance rate of antibody and antigen-antibody complexes. In some cases these effector functions are desirable for a therapeutic antibody but in other cases might be unnecessary or even deleterious, depending on the therapeutic objectives. Certain human IgG isotypes, particularly IgG1 and IgG3, mediate ADCC and CDC via binding to FcγRs and complement CIq, respectively. Neonatal Fc receptors (FcRn) are the critical components determining the circulating half-life of antibodies.

[0316] In one embodiment, a TFcA retains one or more of, and preferably all of the following attributes: ADCC and antibody-dependent cellular phagocytosis (ADCP) that in humans are determined by interactions with activating FcγRI, FcγRIIa/c, FcγRIIIa and inhibitory FcγRIIb receptors; CDC that is triggered by antibody binding to the components of the complement system; and long half-life that is mediated via active recycling by the neonatal Fc receptor (FcRn). When desired, all of these functions can be tuned to optimize the effectiveness of an anti-cancer therapy.

[0317] Certain aa modifications, e.g., the addition, deletion and/or substitution of one or more aas may be made to an immunoglobulin constant region to reduce or increase the natural biological activities of the constant domains, such as those set forth above.

[0318] In certain embodiments, a TFcA (e.g., a TFcBA) comprises an aa modification (e.g., an aa substitution, addition or deletion) in an Fc region that alters one or more antigen-independent effector functions of the domain, e.g., the circulating half-life of a protein comprising the domain. Exemplary antibodies exhibit either increased or decreased binding to FcRn when compared to antibodies lacking such aa changes and, therefore, have an increased or decreased half-life in serum, respectively. Antibodies comprising Fc variants with improved affinity for FcRn are anticipated to have longer serum half-lives, whereas those comprising Fc variants with decreased FcRn binding affinity are expected to have shorter half-lives. In one embodiment, a TFcA with altered FcRn binding comprises at least one Fc region having one or more aa changes within the “FcRn binding loop” of an Fc region. The FcRn binding loop is comprised of aa residues 280-299 (EU) of a wild type, full length, Fc. In certain embodiments, a TFcA having altered FcRn binding affinity comprises at least one Fc region having one or more aa substitutions within the 15 Å FcRn “contact zone.” The term 15 Å FcRn “contact zone” includes residues at the following positions of a wild type, full-length Fc domain: 243-261, 275-280, 282-293, 302-319, 336-348, 367, 369, 372-389, 391, 393, 408, 424-440 (EU). In certain embodiments, a TFcA having altered FcRn binding affinity comprises at least one Fc region (e.g., one or two Fc moieties) having one or more aa changes at an aa position corresponding to any one of the following EU positions: 256, 277-281, 283-288, 303-309, 313, 338, 342, 376, 381, 384, 385, 387, 434 (e.g., N434A or N434K), and 438. Exemplary aa changes that alter FcRn binding activity are disclosed in International PCT Publication No. WO05/047327.

[0319] Additional Fc modifications that enhance FcRn binding include substitutions at positions 259, 308, 428, and 434, e.g., 259I, 308F, 428L, 428M, 434S, 434H, 434F, 434Y, 434M, 428L/434S, 259I/308F and 259I/308F/428L. Other variants that increase Fc binding to FcRn include: 250E, 250Q, 428L, 428F, 250Q/428L (Hinton et al., 2004, J. Biol. Chem. 279(8): 6213-6216, Hinton et al. 2006 Journal of Immunology 176:346-356), 256A, 272A, 286A, 305A, 307A, 307Q, 311A, 312A, 376A, 378Q, 380A, 382A, 434A (Shields et al, Journal of Biological Chemistry, 2001, 276(9):6591-6604, entirely incorporated by reference), 252F, 252T, 252Y, 252W, 254T, 256S, 256R, 256Q, 256E, 256D, 256T, 309P, 311S, 433R, 433S, 433I, 433P, 433Q, 434H, 434F, 434Y, 252Y/254T/256E, 433K/434F/436H, 308T/309P/311S (Dall Acqua et al. Journal of Immunology, 2002, 169:5171-5180, Dall'Acqua et al., 2006, Journal of Biological Chemistry 281:23514-23524, entirely incorporated by reference). Other modifications for modulating FcRn binding are described in Yeung et al., 2010, J Immunol, 182:7663-7671.

[0320] In some embodiments, a TFcA comprises an Fc variant comprising an aa change that alters the antigen-dependent effector functions of the polypeptide, in particular ADCC or complement activation, e.g., as compared to a wild type Fc region. In exemplary embodiment, said antibodies exhibit altered binding to an Fc gamma receptor (e.g., CD16). Such antibodies exhibit either increased or decreased binding to FcγRs when compared to wild type polypeptides and, therefore, mediate enhanced or reduced effector function, respectively. Fc variants with improved affinity for FcγRs are anticipated to enhance effector function, and such proteins may have useful applications in methods of treating mammals where target molecule destruction is desired, e.g., in tumor therapy. In contrast, Fc variants with decreased FcγR binding affinity are expected to reduce effector function. In one embodiment, a TFcA comprises at least one altered antigen-dependent effector function selected from the group consisting of opsonization, phagocytosis, complement dependent cytotoxicity, antigen-dependent cellular cytotoxicity (ADCC), or effector cell modulation as compared to a TFcA comprising a wild type Fc region.

[0321] In certain embodiments, a TFcA exhibits altered binding to an activating FcγR (e.g. FcγRI, FcγRIIa, or FcγRIIIa). In certain embodiments, a TFcA exhibits altered binding affinity to an inhibitory FcγR (e.g. FcγRIIb). In other embodiments, a TFcA having increased FcγR binding affinity (e.g. increased FcγRIIIa binding affinity) comprises at least one Fc domain having an aa change at an aa position corresponding to one or more of the following positions: 239, 268, 298, 332, 334, and 378 (EU). In certain embodiments, a TFcA having decreased FcγR binding affinity (e.g. decreased FcγRI, FcγRII, or FcγRIIIa binding affinity) comprises at least one Fc domain having an aa substitution at an aa position corresponding to one or more of the following positions: 234, 236, 239, 241, 251, 252, 261, 265, 268, 293, 294, 296, 298, 299, 301, 326, 328, 332, 334, 338, 376, 378, and 435 (EU).

[0322] In certain embodiments, a TFcA having increased complement binding affinity (e.g. increased Clq binding affinity) comprises an Fc domain having an aa change at an aa position corresponding to one or more of the following positions: 251, 334, 378, and 435 (EU). In certain embodiments, a TFcA having decreased complement binding affinity (e.g. decreased Clq binding affinity) comprises an Fc domain having an aa substitution at an aa position corresponding to one or more of the following positions: 239, 294, 296, 301, 328, 333, and 376 (EU). Exemplary aa changes that alter FcγR or complement binding activity are disclosed in International PCT Publication No. WO05/063815. In certain embodiments, a TFcA may comprise one or more of the following specific Fc region substitutions: S239D, S239E, M252T, H268D, H268E, 1332D, I332E, N434A, and N434K (EU).

[0323] Other Fc variants that reduce binding to FcγRs and/or complement include variants comprising one or more of the following aa substitutions: 34G, 235G, 236R, 237K, 267R, 269R, 325L, 328R, 236R/328R, 297A, 234A, 235A, 237A, 318A, 228P, 236E, 268Q, 309L, 330S, 331 S, 220S, 226S, 229S, 238S, 233P, and 234V. Removal of the glycosylation at position 297 (see below) also reduces binding to FcγRs.

[0324] Fc modifications that improve binding to FcγRs and/or complement include variants comprising one or more of the following aa substitutions: 236A, 239D, 239E, 268D, 267E, 268E, 268F, 324T, 332D, and 332E. Preferred variants include but are not limited to 239D/332E, 236A/332E, 236A/239D/332E, 268F/324T, 267E/268F, 267E/324T, and 267E/268F/324T. Other modifications for enhancing FcγR and complement interactions include but are not limited to substitutions 298A, 333A, 334A, 326A, 2471, 339D, 339Q, 280H, 290S, 298D, 298V, 243L, 292P, 300L, 396L, 305I, and 396L.

[0325] Variants that improve binding to FcγRIIb include variants comprising one or more of the following aa substitutions: 234D, 234E, 234W, 235D, 235F, 235R, 235Y, 236D, 236N, 237D, 237N, 239D, 239E, 266M, 267D, 267E, 268D, 268E, 327D, 327E, 328F, 328W, 328Y and 332E, 235Y/267E, 236D/267E, 239D/268D, 239D/267E, 267E/268D, 267E/268E, and 267E/328F.

[0326] Fc modifications modulating Fc are described in Strohl, 2009, Current Opinion in Biotechnology 20:685-691.

[0327] A TFcA may also comprise an aa substitution that alters the glycosylation of the TFcA. For example, an immunoglobulin constant region of a TFcA may comprise an Fc domain having a mutation leading to reduced glycosylation (e.g., N- or O-linked glycosylation) or may comprise an altered glycoform of the wild type Fc domain (e.g., a low fucose or fucose-free glycan). An “engineered glycoform” refers to a carbohydrate composition that is covalently attached to an Fc region, wherein said carbohydrate composition differs chemically from that of a parent Fc region. Engineered glycoforms may be useful for a variety of purposes, including but not limited to enhancing or reducing effector function. Engineered glycoforms may be generated by a variety of methods known in the art (U.S. Pat. No. 6,602,684; US Pat Pub No. 2010-0255013; US Pat Pub No. 2003-0003097; WO 00/61739A1; WO 01/29246A1; WO 02/31140A1; WO 02/30954A1); (Potelligent™ technology (Biowa, Inc., Princeton, N.J.); and GlycoMAb™ glycosylation engineering technology (Glycart Biotechnology AG, Zurich, Switzerland). Many of these techniques are based on controlling the level of fucosylated and/or bisecting oligosaccharides that are covalently attached to the Fc region, for example by expressing an Fc polypeptide in various organisms or cell lines, engineered or otherwise (for example Lec-13 CHO cells or rat hybridoma YB2/0 cells), by regulating enzymes involved in the glycosylation pathway (for example FUT8 [al, 6-fucosyltranserase] and/or (31-4-N-acetylglucosaminyl, transferase III [GnTIII]), or by modifying carbohydrate(s) after the Fc polypeptide has been expressed.

In exemplary embodiments, an aa change, e.g., an aa substitution, results in an Fc region comprising reduced glycosylation of the N-linked glycan normally found at aa position 297 (EU). The Fc region may also comprise a low fucose or fucose free glycan at aa position 297 (EU). In certain embodiments, the TFcA has an aa substitution near or within a glycosylation motif, for example, an N-linked glycosylation motif that contains the aa sequence NXT or NXS. In a particular embodiment, a TFcA comprises an aa substitution at an aa position corresponding to 297 or 299 of Fc (EU) as further described herein. Exemplary aa substitutions that reduce or alter glycosylation are disclosed in International PCT Publication No. WO05/018572 and US Pat Pub No. 2007/0111281.

[0328] In other embodiments, a TFcA comprises at least one Fc domain having one or more engineered cysteine residues or analog thereof that are located at the solvent-exposed surface. Preferably the engineered cysteine residue or analog thereof does not interfere with the desired biological activity of the TFcA. For example, it may be desirable that the alteration does not interfere with the ability of the Fc to bind to Fc receptors (e.g. FcγRI, FcγRII, or FcγRIII) or complement proteins (e.g. Clq), or to trigger immune effector function (e.g., antibody-dependent cytotoxicity (ADCC), phagocytosis, or CDC). In certain embodiments, TFcAs comprise an Fc domain comprising at least one engineered free cysteine residue or analog thereof that is substantially free of disulfide bonding with a second cysteine residue. TFcAs may comprise an Fc region having engineered cysteine residues or analogs thereof at one or more of the following positions in the CH3 domain: 349-371, 390, 392, 394-423, 441-446, and 446b (EU), and more specifically positions 350, 355, 359, 360, 361, 389, 413, 415, 418, 422, 441, 443, and EU position 446b.

[0329] Desired effector functions may also be obtained by choosing an Fc from a particular immunoglobulin class or subclass, or by combining particular regions from particular immoglobulin classes or subclasses, e.g., IgG1, IgG2, etc. For example, since ADCC and CDC (through binding of IgG to the FcγRs and Clq, respectively) is mediated by residues located in the hinge and CH2 domain, and since IgG4 essentially lacks effector functions, an Fc constructed by combining the hinge and CH2 domain of IgG4 and the CH3 domain of IgG1 has much reduced effector functions. An lgG1/lgG3 hybrid variant may be constructed by substituting lgG1 positions in the CH2 and/or CH3 region with the amino acids from lgG3 at positions where the two isotypes differ. Thus a hybrid variant IgG antibody may be constructed that comprises one or more of the following substitutions: 274Q, 276K, 300F, 339T, 356E, 358M, 384S, 392N, 397M, 422I, 435R, and 436F. In certain embodiments, an lgG1/lgG2 hybrid variant may be constructed by substituting lgG2 positions in the CH2 and/or CH3 region with amino acids from lgG1 at positions where the two isotypes differ. Thus a hybrid variant IgG antibody may be constructed that comprises one or more of the following amino acid substations: 233E, 234L, 235L, −236G (referring to an insertion of a glycine at position 236), and 327A.

### Exemplary TFc Linkers

[0330] A TFcA may comprise a TFc comprising a first Fc region that is linked to a second Fc region through a TFc linker A wide variety of linkers may be used provided that they are sufficiently flexible to allow proper folding of the TFc and of a TFcA comprising the TFc. In certain embodiments, a linker is biologically inert, e.g., mostly incapable of inducing a biological response, e.g., an immune response.

[0331] A TFc linker may be 1-10, 10-20, 20-30, 30-40, 40-50, 50-60, 60-70, 70-80, 80-90 or at least 90-100 aas long. The size of a TFc linker may depend on whether the second Fc region comprises a hinge, a portion thereof or no hinge at all. For example, when the second Fc region comprises a hinge, a shorter TFc linker may be used than when the second Fc region does not comprise a hinge. For example, when a second Fc region does not comprise a hinge, a TFc linker may be longer by a number of aas corresponding to the length of a hinge. When a second Fc region does not comprise an upper hinge, a TFc linker may be longer by a number of aas corresponding to the length of the upper hinge. In a preferred embodiment, a TFcA, e.g., a TFcA that comprises a second hinge consisting of a middle and lower hinge, comprises a TFc linker comprising from 35 to 45 aas, such as from 37 to 43 aas, such as from 38 to 42 aas, such as from 39 to 41 aas, and more particularly, 40 aas.

[0332] A TFc linker may comprise a Gly-Ser linker. A “Gly-Ser linker” refers to a peptide that consists of glycine and serine residues. An exemplary Gly-Ser linker comprises an aa sequence having the formula (Gly₄Ser)ₙ, wherein n is a positive integer (e.g., 1, 2, 3, 4, 5, 6, 7, 8, 9, 10, 11, 12, 13, 14, 15, 16, 17, 18, 19, 20). For example, in certain embodiments, a TFc linker comprises or consists of (Gly₄Ser)₃ or (Gly₄Ser)₄ or (Gly₄Ser)₅ or (Gly₄Ser)₆ or (Gly₄Ser)₇ or (Gly₄Ser)₈. In a preferred embodiment, the TFc linker is (Gly₄Ser)₈.

[0333] Other linkers that may be used include those that comprise Gly and Ser, but not in a (G4S)n structure. For example, linkers may comprise (Gly-Gly-Ser)n or (Gly-Ser-Gly-Ser)n, wherein n is 1, 2, 3, 4, 5, 6, 7, 8, 9, 10, 11, 12, 13, 14, 15 or more. Other linkers may comprise Pro or Thr. Suitable linkers may be found in the Registry of Standard Biological Parts at http://partsregistry.org/Protein_domains/Linker (see also, e.g., Crasto CJ and Feng JA. LINKER: a program to generate linker sequences for fusion proteins. Protein Eng 2000 May; 13(5) 309-12 and George RA and Hering a J. An analysis of protein domain linkers: their classification and role in protein folding. Protein Eng 2002 November; 15(11) 871-9).

[0334] In certain embodiments, a TFc linker comprises the following aa sequence:

(SEQ ID NO: 169)
TRPAPPSTATTAGSTPQPESASPSGKEPAASSPSSTNTGS

[0335] TFc linkers comprising an aa sequence that differs from SEQ ID NO:169 or from a (G4S)n sequence in at most 1, 2, 3, 4, 5, 6, 7, 8, 9 or 10 aas may also be used.

[0336] A TFc linker may also be a non-peptide linker, such as a non-peptide polymer. The term “non-peptide polymer,” refers to a biocompatible polymer including two or more repeating units linked to each other by a covalent bond excluding the peptide bond. Examples of the non-peptide polymer include poly (ethylene glycol), poly (propylene glycol), copolymers of ethylene glycol and propylene glycol, polyoxyethylated polyols, polyvinyl alcohol, polysaccharides, dextran, polyvinyl ether, biodegradable polymers such as PLA (poly (lactic acid) and PLGA (poly (lactic-glycolic acid), lipid polymers, chitins, and hyaluronic acid. The most preferred is poly (ethylene glycol) (PEG).

### Exemplary TFcs

[0337] TFcAs may comprise a TFc comprising a first Fc region that is linked to a second Fc region through a TFc linker. In certain embodiments, a TFc comprises a first and a second Fc region that are identical to each other. In other embodiments, the first and the second Fc regions differ from each other in at least one aa (“heteromeric TFc”). A first and a second Fc region may be any Fc region disclosed herein or a variation thereof. For example, a TFc may comprise a first Fc region that comprises a full length hinge, e.g., a full length IgG1 or IgG1/IgG4 hybrid hinge, and a second Fc region that comprises a partial hinge, e.g., a hinge that is devoid of the upper hinge.

[0338] First and second Fc regions may be combined with any TFc linker described herein. As set forth above, generally the length of the TFc linker may depend on whether the second Fc region comprises a hinge, a portion thereof, or no hinge at all.

[0339] In certain embodiments, an IgG1 TFc comprises a first Fc region comprising SEQ ID NO:99 and a second Fc region comprising SEQ ID NO:100. Combinations of first and second Fc regions that may be used in IgG1 TFcs are set forth in Table 10.

TABLE 10
Exemplary combinations of first and second Fc regions (shown in FIG. 4)
for use in IgG1 TFcs

| First Fc region | Second Fc region |
|---|---|
| SEQ ID NO:99 | SEQ ID NO:100 |
| SEQ ID NO:101 | SEQ ID NO:102 |
| SEQ ID NO:103 | SEQ ID NO:104 |
| SEQ ID NO:105 | SEQ ID NO:106 |
| SEQ ID NO:107 | SEQ ID NO:108 |
| SEQ ID NO:109 | SEQ ID NO:110 |
| SEQ ID NO:111 | SEQ ID NO:112 |
| SEQ ID NO:113 | SEQ ID NO:114 |
| SEQ ID NO:115 | SEQ ID NO:116 |
| SEQ ID NO:117 | SEQ ID NO:118 |
| SEQ ID NO:119 | SEQ ID NO:120 |
| SEQ ID NO:121 | SEQ ID NO:122 |
| SEQ ID NO:123 | SEQ ID NO:124 |
| SEQ ID NO:125 | SEQ ID NO:126 |
| SEQ ID NO:127 | SEQ ID NO:128 |
| SEQ ID NO:129 | SEQ ID NO:130 |
| SEQ ID NO:131 | SEQ ID NO:132 |

[0340] In certain embodiments, an IgG1/IgG4 hybrid TFc comprises a first Fc region comprising SEQ ID NO:133 and a second Fc region comprising SEQ ID NO:134. Combinations of first and second Fc regions that may be used in IgG1/IgG4 hybrid TFcs are set forth in Table 11.

TABLE 11
Exemplary combinations of first and second Fc regions (shown in FIG. 5)
for use in IgG1/IgG4 TFcs

| First Fc region | Second Fc region |
|---|---|
| SEQ ID NO:133 | SEQ ID NO:134 |
| SEQ ID NO:135 | SEQ ID NO:136 |
| SEQ ID NO:137 | SEQ ID NO:138 |
| SEQ ID NO:139 | SEQ ID NO:140 |
| SEQ ID NO:141 | SEQ ID NO:142 |
| SEQ ID NO:143 | SEQ ID NO:144 |
| SEQ ID NO:145 | SEQ ID NO:146 |
| SEQ ID NO:147 | SEQ ID NO:148 |
| SEQ ID NO:149 | SEQ ID NO:150 |
| SEQ ID NO:151 | SEQ ID NO:152 |
| SEQ ID NO:153 | SEQ ID NO:154 |
| SEQ ID NO:155 | SEQ ID NO:156 |
| SEQ ID NO:157 | SEQ ID NO:158 |
| SEQ ID NO:159 | SEQ ID NO:160 |
| SEQ ID NO:161 | SEQ ID NO:162 |
| SEQ ID NO:163 | SEQ ID NO:164 |
| SEQ ID NO:165 | SEQ ID NO:166 |

[0341] A TFc may comprise a combination of two Fcs set forth in Table 10 or 11, which are linked together through a TFc linker to form a contiguous polypeptide comprising in amino to carboxyl terminal order: a first Fc region, which is linked at its C-terminus to the N-terminus of a TFc linker, which is linked at its C-terminus to the N-terminus of the second Fc region. The TFc linker may comprise or consist of 20 to 50 amino acids in length.

[0342] Exemplary TFcs may comprise: i) a first Fc region comprising a hinge comprising SEQ ID NO:4, a CH2 domain comprising SEQ ID NO:25, a CH3 domain comprising SEQ ID NO:33; ii) a TFc linker comprising (G₄S)₈; and iii) a second Fc region comprising a hinge comprising SEQ ID NO:23, a CH2 domain comprising SEQ ID NO:25 and a CH3 domain comprising SEQ ID NO:37. An exemplary IgG1 TFc comprising this set of elements is a TFc comprising SEQ ID NO:171. Additional combinations of domains or elements forming IgG1 and IgG1/IgG4 hybrid TFcs are provided in Table 12 and 13, respectively. Each of the elements or domains in Tables 12 and 13 is referred to by its SEQ ID NO and the specific AEM and/or DiS that it comprises. Each of the domains or elements in Tables 12 and 13 may be linked directly or indirectly.

[0343] The aa sequence of each of the TFcs listed in Table 12 (SEQ ID NOs:171, 173, 175, 177, 179, 181, 183, 185, 187, 189, 191, 193 and 195) is provided in FIG. 6. The aa sequence of each of the TFcs listed in Table 13 (SEQ ID NOs:197, 199, 201, 203, 205, 207, 209, 211, 213, 215, 217, 219 and 221) is provided in FIG. 7. The first column of Tables 12 and 13 lists the name and SEQ ID NO of an exemplary TFc comprising the elements listed in the corresponding row of the Table.

TABLE 12
IgG1 TFcs set forth in FIG. 6
IgG1 TFc

| | First Fc | | | TFc | Second Fc | | |
|---|---|---|---|---|---|---|---|
| | Hinge | CH2 | CH3 | linker | Hinge | CH2 | CH3 |
| 23 | SEQ ID | SEQ ID | SEQ ID | (G₄S)₈ | SEQ ID | SEQ ID | SEQ ID |
| SEQ ID | NO: 4 | NO: 25 | NO: 33 | | NO: 23 | NO: 25 | NO: 37 |
| NO: 171 | wild type | | T366S/L368A/ | | partial | | T366W |
| | | | Y407V | | | | |
| 23A | SEQ ID | SEQ ID | SEQ ID | (G₄S)₈ | SEQ ID | SEQ ID | SEQ ID |
| SEQ ID | NO: 4 | NO: 25 | NO: 77 | | NO: 23 | NO: 25 | NO: 81 |
| NO: 173 | wild type | | Y349C/T366S/ | | partial | | S354C/T366W |
| | | | L368A/Y407V | | | | |
| 23B | SEQ ID | SEQ ID | SEQ ID | (G₄S)₈ | SEQ ID | SEQ ID | SEQ ID |
| SEQ ID | NO: 4 | NO: 25 | NO: 41 | | NO: 23 | NO: 25 | NO: 45 |
| NO: 175 | wild type | | Y407T | | partial | | T366Y |
| 23C | SEQ ID | SEQ ID | SEQ ID | (G₄S)₈ | SEQ ID | SEQ ID | SEQ ID |
| SEQ ID | NO: 18 | NO: 25 | NO: 33 | | NO: 23 | NO: 25 | NO: 37 |
| NO: 177 | H224C/ | | T366S/L368A/ | | partial | | T366W |
| | T225C | | Y407V | | | | |
| 23D | SEQ ID | SEQ ID | SEQ ID | (G₄S)₈ | SEQ ID | SEQ ID | SEQ ID |
| SEQ ID | NO: 19 | NO: 25 | NO: 33 | | NO: 23 | NO: 25 | NO: 37 |
| NO: 179 | T223C | | T366S/L368A/ | | partial | | T366W |
| | | | Y407V | | | | |
| 23E | SEQ ID | SEQ ID | SEQ ID | (G₄S)₈ | SEQ ID | SEQ ID | SEQ ID |
| SEQ ID | NO: 4 | NO: 25 | NO: 84 | | NO: 23 | NO: 25 | NO: 86 |
| NO: 181 | wild type | | T366S/L368A/ | | partial | | T366W/C-term |
| | | | Y407V/C-term | | | | Cysteine |
| | | | Cysteine | | | | |
| 23G | SEQ ID | SEQ ID | SEQ ID | (G₄S)₄ | SEQ ID | SEQ ID | SEQ ID |
| SEQ ID | NO: 4 | NO: 25 | NO: 33 | | NO: 23 | NO: 25 | NO: 37 |
| NO: 183 | wild type | | T366S/L368A/ | | partial | | T366W |
| | | | Y407V | | | | |
| 23E | SEQ ID | SEQ ID | SEQ ID | (G₄S)₇ | SEQ ID | SEQ ID | SEQ ID |
| (35L) | NO: 4 | NO: 25 | NO: 84 | | NO: 23 | NO: 25 | NO: 86 |
| SEQ ID | wild type | | T366S/L368A/ | | partial | | T366W/C-term |
| NO: 185 | | | Y407V/C-term | | | | Cysteine |
| | | | Cysteine | | | | |
| 23E | SEQ ID | SEQ ID | SEQ ID | (G₄S)₇ | SEQ ID | SEQ ID | SEQ ID |
| (35L) Inv | NO: 4 | NO: 25 | NO: 88 | | NO: 23 | NO: 25 | NO: 90 |
| SEQ ID | wild type | | T366S/L368A/ | | partial | | T366W/C-term |
| NO: 187 | | | Y407V/C-term | | | | Cysteine Inv |
| | | | Cysteine Inv | | | | |
| 23E | SEQ ID | SEQ ID | SEQ ID | (G₄S)₆ | SEQ ID | SEQ ID | SEQ ID |
| (30L) | NO: 4 | NO: 25 | NO: 84 | | NO: 23 | NO: 25 | NO: 86 |
| SEQ ID | wild type | | T366S/L368A/ | | partial | | T366W/C-term |
| NO: 189 | | | Y407V/C-term | | | | Cysteine |
| | | | Cysteine | | | | |
| 23E | SEQ ID | SEQ ID | SEQ ID | (G₄S)₅ | SEQ ID | SEQ ID | SEQ ID |
| (25L) | NO: 4 | NO: 25 | NO: 84 | | NO: 23 | NO: 25 | NO: 86 |
| SEQ ID | wild type | | T366S/L368A/ | | partial | | T366W/C-term |
| NO: 191 | | | Y407V/C-term | | | | Cysteine |
| | | | Cysteine | | | | |
| 23I | SEQ ID | SEQ ID | SEQ ID | (G₄S)₈ | SEQ ID | SEQ ID | SEQ ID |
| SEQ ID | NO: 4 | NO: 25 | NO: 92 | | NO: 23 | NO: 25 | NO: 94 |
| NO: 193 | wild type | | S364H/F405A | | partial | | Y349T/T394F |
| 23J | SEQ ID | SEQ ID | SEQ ID | (G₄S)₈ | SEQ ID | SEQ ID | SEQ ID |
| SEQ ID | NO: 4 | NO: 25 | NO: 96 | | NO: 23 | NO: 25 | NO: 98 |
| NO: 195 | wild type | | K370D/K392D/ | | partial | | D356K/E357K/ |
| | | | K409D | | | | D399K |

TABLE 13
IgG1/IgG4 hybrid TFcs set forth in FIG. 7
IgG1/IgG4 hybrid TFc

| | First Fc | | | TFc | Second Fc | | |
|---|---|---|---|---|---|---|---|
| | Hinge | CH2 | CH3 | linker | Hinge | CH2 | CH3 |
| 39 | SEQ ID | SEQ ID | SEQ ID | (G₄S)₈ | SEQ ID | SEQ ID | SEQ ID |
| SEQ ID | NO: 20 | NO: 26 | NO: 33 | | NO: 24 | NO: 26 | NO: 37 |
| NO: 197 | wild type | | T366S/L368A/ | | partial | | T366W |
| | | | Y407V | | | | |
| 39A | SEQ ID | SEQ ID | SEQ ID | (G₄S)₈ | SEQ ID | SEQ ID | SEQ ID |
| SEQ ID | NO: 20 | NO: 26 | NO: 77 | | NO: 24 | NO: 26 | NO: 81 |
| NO: 199 | wild type | | Y349C/T366S/ | | partial | | S354C/T366W |
| | | | L368A/Y407V | | | | |
| 39B | SEQ ID | SEQ ID | SEQ ID | (G₄S)₈ | SEQ ID | SEQ ID | SEQ ID |
| SEQ ID | NO: 20 | NO: 26 | NO: 41 | | NO: 24 | NO: 26 | NO: 45 |
| NO: 201 | wild type | | Y407T | | partial | | T366Y |
| 39C | SEQ ID | SEQ ID | SEQ ID | (G₄S)₈ | SEQ ID | SEQ ID | SEQ ID |
| SEQ ID | NO: 21 | NO: 26 | NO: 33 | | NO: 24 | NO: 26 | NO: 37 |
| NO: 203 | H224C/ | | T366S/L368A/ | | partial | | T366W |
| | T225C | | Y407V | | | | |
| 23D | SEQ ID | SEQ ID | SEQ ID | (G₄S)₈ | SEQ ID | SEQ ID | SEQ ID |
| SEQ ID | NO: 22 | NO: 26 | NO: 33 | | NO: 24 | NO: 26 | NO: 37 |
| NO: 205 | T223C | | T366S/L368A/ | | partial | | T366W |
| | | | Y407V | | | | |
| 39E | SEQ ID | SEQ ID | SEQ ID | (G₄S)₈ | SEQ ID | SEQ ID | SEQ ID |
| SEQ ID | NO: 20 | NO: 26 | NO: 84 | | NO: 24 | NO: 26 | NO: 86 |
| NO: 207 | wild type | | T366S/L368A/ | | partial | | T366W/C-term |
| | | | Y407V/C-term | | | | Cysteine |
| | | | Cysteine | | | | |
| 39G | SEQ ID | SEQ ID | SEQ ID | (G₄S)₄ | SEQ ID | SEQ ID | SEQ ID |
| SEQ ID | NO: 20 | NO: 26 | NO: 33 | | NO: 24 | NO: 26 | NO: 37 |
| NO: 209 | wild type | | T366S/L368A/ | | partial | | T366W |
| | | | Y407V | | | | |
| 39E | SEQ ID | SEQ ID | SEQ ID | (G₄S)₇ | SEQ ID | SEQ ID | SEQ ID |
| (35L) | NO: 20 | NO: 26 | NO: 84 | | NO: 24 | NO: 26 | NO: 86 |
| SEQ ID | wild type | | T366S/L368A/ | | partial | | T366W/C-term |
| NO: 211 | | | Y407V/C-term | | | | Cysteine |
| | | | Cysteine | | | | |
| 39E | SEQ ID | SEQ ID | SEQ ID | (G₄S)₇ | SEQ ID | SEQ ID | SEQ ID |
| (35L) Inv | NO: 20 | NO: 26 | NO: 88 | | NO: 24 | NO: 26 | NO: 90 |
| SEQ ID | wild type | | T366S/L368A/ | | partial | | T366W/C-term |
| NO: 213 | | | Y407V/C-term | | | | Cysteine Inv |
| | | | Cysteine Inv | | | | |
| 39E | SEQ ID | SEQ ID | SEQ ID | (G₄S)₆ | SEQ ID | SEQ ID | SEQ ID |
| (30L) | NO: 20 | NO: 26 | NO: 84 | | NO: 24 | NO: 26 | NO: 86 |
| SEQ ID | wild type | | T366S/L368A/ | | partial | | T366W/C-term |
| NO: 215 | | | Y407V/C-term | | | | Cysteine |
| | | | Cysteine | | | | |
| 39E | SEQ ID | SEQ ID | SEQ ID | (G₄S)₅ | SEQ ID | SEQ ID | SEQ ID |
| (25L) | NO: 20 | NO: 26 | NO: 84 | | NO: 24 | NO: 26 | NO: 86 |
| SEQ ID | wild type | | T366S/L368A/ | | partial | | T366W/C-term |
| NO: 217 | | | Y407V/C-term | | | | Cysteine |
| | | | Cysteine | | | | |
| 39I | SEQ ID | SEQ ID | SEQ ID | (G₄S)₈ | SEQ ID | SEQ ID | SEQ ID |
| SEQ ID | NO: 20 | NO: 26 | NO: 92 | | NO: 24 | NO: 26 | NO: 94 |
| NO: 219 | wild type | | S364H/F405A | | partial | | Y349T/T394F |
| 39J | SEQ ID | SEQ ID | SEQ ID | (G₄S)₈ | SEQ ID | SEQ ID | SEQ ID |
| SEQ ID | NO: 20 | NO: 26 | NO: 96 | | NO: 24 | NO: 26 | NO: 98 |
| NO: 221 | wild type | | K370D/K392D/ | | partial | | D356K/E357K/ |
| | | | K409D | | | | D399K |

[0344] In certain embodiments, a TFc comprises an aa sequence that differs from that of a TFc described herein, e.g., an aa sequence selected from the group consisting of SEQ ID NOs:171, 173, 175, 177, 179, 181, 183, 185, 187, 189, 191, 193, 195, 197, 199, 201, 203, 205, 207, 209, 211, 213, 215, 217, 219 and 221, in at most 10, 20, 30, 40, 50, 60, 70, 80, 90, 100, 150, 200, 250 or 300 aas, provided that the TFc has the desired biological activity, such as effector function or lack thereof, proper folding, sufficient stability and solubility. Differences may be one or more aa insertions, deletions and/or substitutions. In certain embodiments, a TFc comprises an aa sequence that is at least about 70%, 75%, 80%, 85%, 90%, 95%, 97%, 98%, or 99% identical to that of a TFc described herein, e.g., an aa sequence selected from the group consisting of SEQ ID NOs:171, 173, 175, 177, 179, 181, 183, 185, 187, 189, 191, 193, 195, 197, 199, 201, 203, 205, 207, 209, 211, 213, 215, 217, 219 and 221, provided that the TFcA comprising the TFc has the desired biological activity, such as effector function or lack thereof, proper folding, sufficient stability and/or sufficient solubility.

### Exemplary Binding Sites

[0345] A TFcA may be a monovalent TFcA that comprises a single binding site. The single binding site may be located a the amino terminus or carboxyl terminus of the TFc. The single binding site may be a Fab or an scFv. When the single binding site is a Fab, the monovalent TFcA comprises a heavy chain comprising the VH domain and optionally a CH1 domain and a light chain comprising the VL domain and optionally a CL domain.

[0346] A TFcA may also be a TFcBA comprising two binding sites, e.g., wherein each binding site binds to the same or to a different epitope or antigen (a bivalent monospecific of bispecific TFcA). The binding sites of a TFcBA may be of the same type or of a different type. For example, both binding sites may be TFcs, both binding sites may be Fabs, one binding site may be a Fab and the other binding site may be an scFv. Single domain binding sites may also be used. A Fab will generally comprise a VH domain, which may be linked to a CH1 domain on the heavy chain of a TFcBA and a VL domain, which may be linked to a CL domain on the light chain of the molecule. An scFv will generally comprise a VH domain linked to an scFv linker that is linked to a VL domain.

[0347] An scFv may be connected to a TFc by a connecting linker. A connecting linker may be about 1-5, 1-10, 1-15, 1-20 aas long or longer. A connecting linker is preferably chemically inert, non immunogenic and has the required flexibility and rigidity for allowing the proper conformation of a TFcBA comprising the scFv. In one embodiment, a connecting linker comprises a Gly-Ser sequence, e.g., the aa sequence (G₄S)ₙ, wherein n is 1, 2, 3, 4, or 5 or more. In one embodiment, a connecting linker comprises (G₄S)₂ (see, e.g., FIG. 9).

[0348] An scFv comprises an scFv linker that links together the VH and the VL domains. An scFv linker may be 15-30 or 20-25 aa long. An scFv linker is preferably chemically inert, non immunogenic and has the required flexibility and rigidity for allowing the proper conformation of a TFcBA comprising the scFv. In one embodiment, an scFv linker comprises a Gly-Ser sequence, e.g., the aa sequence (G₄S)ₙ, wherein n is 1, 2, 3, 4, or 5 or more. However, other sequences may also be used. In certain embodiments, an scFv linker may comprise a portion of a hinge or a full length hinge alone or together with other aas, such as a (G₄S)ₙ sequence. In certain embodiments, an scFv linker comprises the sequence “AST” (the first 3 aa of a CH1 domain) upstream of a peptide linker, such as a Gly-Ser linker, e.g., (G₄S)ₙ (see, e.g., FIG. 9).

[0349] In certain embodiments, a TFcA does not comprise a first and/or a second hinge. Instead of a hinge, a TFcA may comprise a connecting linker. Such a linker may be a Gly-Ser linker as further described herein in the context of TFc linkers. An exemplary connecting linker may be shorter than a TFc linker. In certain embodiments, a connecting linker comprises a (G₄S)₃ or (G₄S)₄ sequence. In certain embodiments, a connecting linker comprises a portion of a hinge, e.g., an upper hinge, middle hinge, lower hinge, or a combination thereof or a portion of one of these and another peptide sequence, such as a (G₄S)ₙ sequence, wherein n is 1, 2, 3, 4 or 5. Other peptide sequences may also be used as a connecting linker provided that they provide the required flexibility and rigidity of certain parts of the linker.

[0350] In certain embodiments, a binding site is an antigen binding site, such as a Fab, scFv or single domain. Exemplary TFcAs comprise one or more VH and/or VL CDRs such as those from one or more of the variable regions provided herein. In certain embodiments, an anti-c-Met binding site comprises a VHCDR3 and/or a VLCDR3 sequence set forth in FIG. 9, such as those of the variable domains of the humanized antibody 5D5 (US2006/0134104) or the anti-c-Met binding site 2 (see Example 3). In certain embodiments, an anti-c-Met binding site comprises 1, 2 or 3 CDRs of one of the VH domains set forth in FIG. 9 and/or 1, 2 or 3 CDRs of the VL domain set forth in FIG. 9. In certain embodiments, an anti-EGFR binding site comprises a VHCDR3 and/or a VLCDR3 sequence set forth in FIG. 9. In certain embodiments, an anti-EGFR binding site comprises 1, 2 or 3 CDRs of one of the VH domains set forth in FIG. 9 and/or 1, 2 or 3 CDRs of one of the VL domains set forth in FIG. 9. Binding sites may also comprise one or more CDRs set forth in FIG. 9, wherein 1, 2 or 3 aas have been changed, e.g., substituted, added or deleted, provided that the binding sites are still able to bind specifically to their target.

[0351] In certain embodiments, TFcAs comprise one or more variable domains set forth in FIG. 9. For example, an anti-c-Met binding site may comprise a VH and/or VL sequence set forth in FIG. 9, such as the variable domains of the humanized antibody 5D5 (US2006/0134104) or the anti-c-Met binding site 2. Exemplary anti-EGFR binding sites comprise a VH and/or a VL sequence set forth in FIG. 9, such as those of panitumumab, 2224, cetuximab or humanized cetuximab H1L1, H1L2, H2L1 or H2L2 (see Example 3).

[0352] In certain embodiments, anti-c-Met/anti-EGFR TFcAs comprise an anti-c-Met Fab and an anti-EGFR scFv. Table 14 shows combinations of CDRs or variable domains of each of the following anti-c-Met and anti-EGFR aa sequences that may be used for forming TFcAs. The Table provides a SEQ ID NO if the sequence is provided herein or a “yes” if a combination is possible, but the resulting aa sequence is not specifically provided. A person of skill in the art will be able to create such a molecule without undue experimentation based on the fact that all the elements of such proteins and nucleotide sequences encoding such are provided herein.

TABLE 14
Heavy chains of exemplary TFcAs

| | | Anti-c-Met Fab | |
|---|---|---|---|
| | | Humanized 5D5 | Binding site 2 |
| Anti- | panitumumab | SEQ ID NO:235, | yes |
| EGFR | | 343, 225, 227 and | |
| scFv | | 229 | |
| | 2224 | SEQ ID NO:239 | yes |
| | cetuximab H1L1 | SEQ ID NO:260 | SEQ ID NO:291 |
| | cetuximab H1L2 | SEQ ID NO:281 | yes |
| | cetuximab H2L1 | SEQ ID NO:283 | yes |
| | cetuximab H2L2 | SEQ ID NO:285 | yes |

[0353] Light chains that may be used with the heavy chains in Table 14 are the light chains of the particular anti-c-Met Fab used in the TFcA. For example, a TFcA comprising a VH domain from humanized 5D5, e.g., TFcAs comprising any one of SEQ ID NOs:225, 227, 229, 235, 239, 260, 281, 283, 285 and 342, may be used with a light chain comprising the VL domain of humanized 5D5, i.e., SEQ ID NO:231. A TFcA comprising a VH domain from the anti-c-Met binding site 2, e.g., TFcAs comprising SEQ ID NO:291, may be used with a light chain comprising the VH domain of the anti-c-Met binding site 2, e.g., the VL domain of SEQ ID NO:289.

[0354] Antigen binding sites, e.g., the ones described herein, may be engineered for enhanced stability, reduced heterogeneity, enhanced expression, enhanced solubility or other desirable characteristic. Methods for engineering of antibody fragments, such as scFv, VH, VL, and Fab with enhanced stability and increased expression are described, e.g., in US 2006/0127893 US 2009/0048122 and references therein.

[0355] Variable domains may differ from those set forth herein in, or in at most, 1, 2, 3, 4, 5, 6, 7, 8, 9, 10, 15, 20, 25, 30, 50, 100 aas, provided that a binding site with a modified variable region retains its ability to bind specifically to its target antigen, e.g., a human antigen selected from c-MET, ErbB2, ErbB3, ErbB4, IGF1R, IGF2R, Insulin receptor, RON, EGFR, VEGFR1, VEGFR2, TNFR, FGFR1-4, PDGFR (alpha and beta), c-Kit, EPCAM and EphA2. Variable domains for use in TFcAs, e.g., TFcBAs, may also comprise a VH or VL aa sequence that is at least 70%, 75%, 80%, 85%, 90%, 95%, 97%, 98% or 99% identical to the VH or VL aa sequence set forth in FIG. 9, provided that a binding site with a modified variable domain retains its ability to bind specifically to its target antigen.

[0356] Anti-c-MET and/or anti-EGFR TFcBAs may also comprise a binding site that binds to the same epitope on human c-Met or human EGFR as the binding sites provided herein, such as the ones having sequences set forth in FIG. 9. Binding sites encompassed herein may also competitively block or compete with the binding of a binding site described herein, such as the ones having sequences set forth in FIG. 9. A TFcA comprising a binding site that competes with a binding site described herein for binding to a target antigen or epitope include the binding sites that are capable of displacing a reference binding site (e.g., as described herein), e.g., when added in an ELISA after the reference binding site, as well as binding sites that prevent a reference binding site from binding when the binding site is added after the reference binding site to an ELISA.

[0357] TFcAs may also comprise variable domains from anti-c-Met, anti-c-Kit, anti-ErbB2, anti-ErbB3, anti-ErbB4, anti-IGF1R, anti-IGF2R, anti-Insulin receptor, anti-RON, anti-VEGFR1, anti-VEGFR2, anti-TNFR, anti-FGFR1, anti-FGFR2, anti-FGFR3, anti-FGFR4, anti-PDGFR alpha, anti-PDGFR beta, anti-EPCAM, anti-EphA2 or anti-EGFR antibodies known in the art. Known anti-c-Met antibodies are set forth in U.S. Pat. No. 5,686,292, U.S. Pat. No. 7,476,724, WO 2004/072117, WO 2004/108766, WO 2005/016382, WO 2005/063816, WO 2006/015371, WO 2006/104911, WO 2007/126799, and WO 2009/007427. Exemplary known anti-EGFR antibodies include ABX-EGF (Abgenix) (Yang, X. D., et al., Crit. Rev. Oncol./Hematol. 38 (2001) 17-23) and humanized ICR62 (WO 2006/082515). Exemplary anti-c-Kit antibodies are set forth in U.S. Pat. No. 7,915,391 and EP 0586445B1. Exemplary anti-ErbB2 antibodies are set forth in U.S. Pat. No. 5,821,337 and U.S. Pat. No. 7,560,111. Exemplary anti-ErbB3 antibodies are set forth in U.S. Pat. No. 7,705,130, U.S. Pat. No. 7,846,440 and WO 2011/136911. Exemplary anti-ErbB4 antibodies are set forth in U.S. Pat. No. 7,332,579 and US 2010/0190964. Exemplary anti-IGF1R antibodies are set forth in U.S. Pat. No. 7,871,611 and U.S. Pat. No. 7,700,742. Exemplary anti-Insulin receptor antibodies are set forth in Bhaskar V. et al, Diabetes. 2012 May; 61(5):1263-71. Exemplary anti-RON antibodies are set forth in WO 2012/006341, US 2009/0226442, and U.S. Pat. No. 7,947,811. Exemplary anti-VEGFR1 antibodies are set forth in WO 2005/037235. Exemplary anti-VEGFR2 antibodies are set forth in U.S. Pat. No. 8,057,791 and U.S. Pat. No. 6,344,339. Exemplary anti-TNFR1 antibodies are set forth in EP 1972637B1 and US 2008/0008713. Exemplary anti-FGFR1 antibodies are set forth in Ronca R et al, Mol Cancer Ther; 9(12); 3244-53, 2010, and WO 2005/037235. Exemplary anti-FGFR2 antibodies are set forth in WO 2011/143318. Exemplary anti-FGFR3 antibodies are set forth in WO 2010/002862 and EP 1423428B1. Exemplary anti-FGFR4 antibodies are set forth in WO 03/063893, WO 2008/052796 and US 2010/0169992. Exemplary anti-PDGFR alpha antibodies are set forth in U.S. Pat. No. 8,128,929 and WO 1995/000659. Exemplary anti-PDGFR beta antibodies are set forth in U.S. Pat. No. 7,740,850. Exemplary anti-EPCAM antibodies are set forth in U.S. Pat. No. 7,976,842, US 2003/0157054, and WO 2001/007082. Exemplary anti-EphA2 antibodies are set forth in EP 1575509B1, U.S. Pat. No. 7,402,298, and U.S. Pat. No. 7,776,328. Exemplary CD-44m antibodies are set forth in U.S. Pat. No. 8,071,072, WO 2008/079246, U.S. Pat. No. 6,972,324. Exemplary CEA antibodies are set forth in U.S. Pat. No. 7,626,011. Exemplary ALK antibodies are set forth in U.S. Pat. No. 6,696,548, U.S. Pat. No. 7,902,340, and WO 2008/131575. Exemplary AXL antibodies are set forth in US 2010/0330095, US 2012/0121587, and WO 2011/159980.

[0358] In another embodiment, a binding site is a binding peptide. c-Met binding peptides are known e.g. from Matzke, A., et al., Cancer Res 65 (14) (2005) 6105-10. And Tam, Eric, M., et al., J. Mol. Biol. 385 (2009)79-90.

[0359] Binding sites preferably bind specifically to their target with Kd of 10⁻⁶, 10⁻⁷, 10⁻⁸, 10⁻⁹ M, or 10⁻¹⁰ M or an even lower Kd value, as measured, e.g., by surface plasmon resonance (e.g., using a BIAcore system).

[0360] TFcAs may bind specifically to any target protein, e.g., soluble or membrane human target proteins. Exemplary target proteins include human receptor proteins selected from the group consisting of ErbB2, ErbB3, ErbB4, IGF1R, IGF2R, Insulin receptor, RON, VEGFR1, VEGFR2, TNFR, FGFR1-4, PDGFR (alpha and beta), c-Kit, c-Met, EPCAM and EphA2.

### Exemplary Heavy and Light Chains

[0361] In one embodiment, a TFcA comprises a heavy chain and a light chain. In one embodiment, an anti-c-Met/anti-EGFR TFcBA comprises a heavy chain comprising an aa sequence set forth in FIG. 9 and/or a light chain comprising an aa sequence set forth in Example 3.

[0362] TFcBAs may also comprise a heavy chain and/or a light chain that comprise an aa sequence that differs from an aa sequence set forth in FIG. 9 in, or in at most 1, 2, 3, 4, 5, 6, 7, 8, 9, 10, 15, 20, 25, 30, 50, 100, 200, or 300 aas, provided that the TFcBA has the desired biological characteristic(s), as further described herein. A TFcBAs may also comprise a heavy chain and/or a light chain comprising an aa sequence that is at least 70%, 75%, 80%, 85%, 90%, 95%, 97%, 98% or 99% identical to the aa sequence of a heavy chain or light chain of FIG. 9, wherein the TFcBA has the desired biological characteristic(s).

[0363] TFcBAs may also comprise more than 2 binding sites, in which case, the heavy chain will comprise 1, 2, 3, 4 or more VH domains, which may be linked to the N- and/or C-terminus of any one of the following molecules: Fab-TFc-scFv; Fab-TFc-Fab; scFv-TFc-scFv; and scFv-TFc-Fab. The additional binding sites may be either Fabs or scFvs.

### Biological Activities of TFcAs

[0364] In certain embodiments, a TFcA, e.g., a TFcBA, binding to one or more target proteins inhibits signal transduction mediated by the one or more target proteins. For example, an anti-c-Met+anti-EGFR TFcBA may inhibit signal transduction mediated through either or both of c-Met and EGFR. Inhibition of signal transduction may be evidenced, e.g., by inhibition of phosphorylation of EGFR and ERK. In certain embodiments, a TFcA inhibits phosphorylation of c-Met, EGFR and/or ERK by at least 30%, 40%, 50%, 60%, 70%, 80%, 85%, 90%, 95%, 98%, 99% or more, relative to phosphorylation in the absence of the TFcA, when determined, e.g., at the end of the experiment, e.g., as set forth in the Examples. Preferred TFcAs inhibit c-Met and/or EGFR signal transduction, e.g., measured by inhibition of phosphorylation of c-Met and EGFR, nearly completely, e.g., by at least 90%, 91%, 92%, 93%, 94%, 95%, 96%, 97%, 98%, 99% or 99.5%.

[0365] Although the biological characteristics described in this section are described mostly in the context of anti-c-Met/anti-EGFR TFcBAs, the description also applies to other TFcBAs, as well as monovalent TFcAs.

[0366] Inhibition of a) ligand mediated phosphorylation of c-Met, and b) ligand-mediated phosphorylation of EGFR can be demonstrated by the ability of a TFcBA to reproducibly decrease the level of phosphorylation of a) c-Met induced by an HGF family ligand, b) EGFR induced by an EGFR ligand, e.g., EGF, or c) ERK induced by a c-Met ligand or an EGFR ligand, each relative to the phosphorylation in control cells that are not contacted with the TFcBA. The cell which expresses c-Met and/or EGFR can be a naturally occurring cell or a cell of a cell line or can be recombinantly produced by introducing nucleic acid encoding c-Met and/or EGFR into a host cell. In certain embodiments, a TFcBA inhibits a HGF family ligand mediated phosphorylation of c-Met by at least about 5%, 10%, 20%, 30%, 40%, 50%, 60%, 70%, 80%, 85%, 90%, 91%, 92%, 93%, 94%, 95%, 96%, 97%, 98% or 99%, or more, as determined, for example, by ELISA, and calculated as set forth in the Examples. In certain embodiments, a TFcBA inhibits EGF-mediated phosphorylation of EGFR by at least about 5%, 10%, 20%, 30%, 40%, 50%, 60%, 70%, 80%, 85%, 90%, 91%, 92%, 93%, 94%, 95%, 96%, 97%, 98% or 99%, or more, as determined, for example, by ELISA, and calculated as set forth in the Examples. In certain embodiments, a TFcBA inhibits EGF and/or c-Met-mediated phosphorylation of ERK by at least about 5%, 10%, 20%, 30%, 40%, 50%, 60%, 70%, 80%, 85%, 90%, 91%, 92%, 93%, 94%, 95%, 96%, 97%, 98% or 99%, or more, as determined, for example, by ELISA, and calculated as set forth in the Examples.

[0367] TFcBAs may inhibit ligand induced phosphorylation of c-Met by at least 70% or 80%, ligand induced phosphorylation of EGFR by at least 85%, 90% or 95% and optionally ligand induced phosphorylation of ERK by at least 5% or 10%. TFcBAs may also inhibit ligand induced phosphorylation of c-Met by at least 85%, ligand induced phosphorylation of EGFR by at least 85% and optionally ligand induced phosphorylation of ERK by at least 5%. In certain embodiments, TFcBAs inhibit ligand induced phosphorylation of c-Met by at least 50% and ligand induced phosphorylation of EGFR by at least 90%, and optionally ligand induced phosphorylation of ERK by at least 5%.

[0368] TFcBAs may also be defined by the EC50 (i.e. the concentration of TFcBA at which 50% of maximum inhibition is obtained) of their inhibition of phosphorylation of one or more of c-Met, EGFR and ERK, which EC50s may be determined as further described herein. For example, TFcBAs disclosed herein may inhibit phosphorylation of c-Met with an EC50 of 10⁻⁸ M, 10⁻⁹ M, 10⁻¹⁰ M or lower. They may inhibit phosphorylation of EGFR with an EC50 of 10⁻⁸ M, 10⁻⁹ M, 10⁻¹⁰ M or lower. They may inhibit phosphorylation of ERK with an EC50 of 10⁻⁷ M, 10⁻⁸ M, 10⁻⁹ M, 10⁻¹⁰ M or lower. Some TFcBAs disclosed herein inhibit phosphorylation of c-Met by at least 80% or 85% with an EC50 of 10⁻⁸ M, 10⁻⁹ M, 10⁻¹⁰ M or lower; inhibit phosphorylation of EGFR by at least 80% or 85% with an EC50 of 10⁻⁸ M, 10⁻⁹ M, 10⁻¹⁰M or lower; and optionally inhibit phosphorylation of ERK by at least 5% with an EC50 of 10⁻⁷ M, 10⁻⁸ M, 10⁻⁹ M, 10⁻¹⁰ M or lower. In some cases, essentially complete blockage of either or both of phosphorylation of c-Met and phosphorylation of EGFR will be obtainable with a TFcBA herein disclosed.

[0369] In certain embodiments, a solution comprising TFcAs at a concentration of 0.3, 0.5, 1, 2, 3, 4, 5, 6, 7, 8, 9, 10, 11, 12, 13, 14, 15 mg/ml or more (or ranges of concentrations between any of these two numbers) comprises more than 70%, 75%, 80%, 85%, 90%, 95%, 96%, 97%, 98% or 99% of TFcBAs in unaggregated form (referred to in this context as monomers) as determined e.g., by Size Exclusion Chromatography (SEC) e.g., following, a stability test as described below. The percentage of monomers may be determined in a solution after one of the following stability tests: a) incubation at 4° C. for 1, 2, 3, 4, 5, or 6 days, or 1, 2, 3 or more weeks; b) incubation at room temperature for 1, 2, 3, 4, 5, or 6 days, or 1, 2, 3 or more weeks; c) incubation at 37° C. for 1, 2, 3, 4, 5, or 6 days, or 1, 2, 3 or more weeks; d) 1, 2, 3, 4 or 5 cycles of freeze/thaw, and e) agitation, e.g., gentle agitation on the orbital shaker at room temperature, e.g., for 1, 2, 3, 4, 5 or more hours.

[0370] In certain embodiments, a TFcA exhibits a stability after 1, 2, 3, 4 or 5 days of incubation in serum at 37° C. of at least 70%, 75%, 80%, 85%, 90%, 95%, 96%, 97%, 98% or 99%, relative to its stability at day 0, where the stability of a protein is determined by, e.g., SEC or by measuring its ability to bind to one or more of its target antigens after incubation.

[0371] In certain embodiments, a TFcA has a melting temperature (Tm) as determined e.g., by Differential Scanning Fluorimetry (DSF) of at least 50° C., 55° C., 58° C. or 60° C., as described in the Examples.

[0372] TFcAs may have a combination of two or more of the characteristics set forth herein. For example, a TFcBA may inhibit ligand induced phosphorylation of c-Met by at least 70% and ligand induced phosphorylation of EGFR by at least 70%, and also exhibit one or more of the following characteristics: (i) a Tm, as determined by DSF, of at least 55 or 60° C.; and (ii) be at least 70%, 80% or 90% monomeric in PBS at 10 mg/mL after 5 or more days at at room temperature, 2 weeks at 4° C., one or more cycles of freeze-thaw or gentle agitation. In certain embodiments, TFcBAs have a Tm of at least 60° C. and stability at room temperature, 4° C. or 37° C. of at least 90% (concentration of monomer after incubation under these conditions relative to the initial concentration of monomer).

[0373] In certain embodiments, a TFcA composition comprises one or more of the following characteristics: 1) at least 50%, 60%, 70%, 80%, 90% or more of the proteins are visible on SDS PAGE after purification on protein A; 2) at least 50%, 60%, 70%, 80%, 90% or more of observed species on SDS-PAGE gels are of the correct molecular weight; 3) the thermal stability profile, as measured by Differential Scanning Fluorimetry, does not show molten globular behavior; 4) does not comprise more than 50%, 60%, 70%, 80%, 90%, 95%, 98% or 99% or more monomer as visualized by SEC; and 5) inhibits more than 95% of EGF receptor signaling activated by addition of exogenous EGF ligand, as measured by pEGFR inhibition.

[0374] Standard assays may be used for determining the biological activity and characteristics of TFcAs, such as TFcBAs. Exemplary assays are provided in the Examples.

### Nucleic Acids, Expression Vectors and Host Cells

[0375] Provided herein are nucleic acids, e.g., DNA and RNA, encoding the polypeptides described herein. Exemplary nucleotide sequences provided herein are those encoding the aa sequences set forth in the Figures. In certain embodiments, a nucleotide sequence encoding a heavy or light chain of a TFcA is linked to a sequence that enhances or promotes the expression of the nucleotide sequence in a cell to produce a protein. Such nucleic acids may be encompassed within a vector, e.g., an expression vector.

[0376] For the purposes of being secreted, a heavy and/or light chain of a TFcA preferably comprises a signal sequence, which is normally cut off after secretion to provide a mature polypeptide. The following signal sequences may be used:

(SEQ ID NO: 241)
MGFGLSWLFLVAILKGVQC:
for use, e.g., in expressing heavy chains; and
(SEQ ID NO: 243)
MGTPAQLLFLLLLWLPDTTG
for use, e.g., in expressing light chains.

[0377] An exemplary nucleotide sequence encoding SEQ ID NO:241 is atgggcttcggactgtcgtggctttttctggtggcgattcttaagggggtccagtgc (SEQ ID NO:240) and an exemplary nucleotide sequence encoding SEQ ID NO:243 is atgggcacccccgcacagctcttgttcttgctgcttctttggctccctgacacaactggt (SEQ ID NO:242).

[0378] Nucleic acids, e.g., DNA, that comprise a nucleotide sequence that is at least about 70%, 75%, 80%, 90%, 95%, 97%, 98% or 99% identical to a nucleotide sequence encoding a polypeptide described herein or a nucleotide sequence set forth herein, and which encode a heavy and or light chain of a TFcA, or portion thereof, as further described herein, are also encompassed herein. Such nucleotide sequences may encode a protein set forth herein or may encode a protein that is at least 70%, 75%, 80%, 85%, 90%, 95%, 97%, 98% or 99% identical or similar to a protein set forth herein or a portion thereof (e.g., a domain), such as an aa sequence set forth in any one of the Figures.

[0379] Also encompassed herein are cells, e.g., host cells, comprising a nucleic acid or a vector provided herein.

[0380] The TFcAs described herein may be produced by recombinant means. Methods for recombinant production are widely known in the state of the art and comprise protein expression in prokaryotic and eukaryotic cells with subsequent isolation of the antibody and usually purification to a pharmaceutically acceptable purity. For the expression of the TFcAs in a host cell, nucleic acids encoding the respective polypeptides, e.g., light and heavy chains, are inserted into expression vectors by standard methods. Expression is performed in appropriate prokaryotic or eukaryotic host cells like CHO cells, NSO cells, SP2/0 cells, HEK293 cells, COS cells, PER.C6 cells, yeast, or E. coli cells, and the TFcA is recovered from the cells (supernatant or cells after lysis). General methods for recombinant production of antibodies are well-known in the state of the art and described, for example, in the review articles of Makrides, S.C., Protein Expr. Purif 17 183-202 (1999); Geisse, S., et al, Protein Expr. Purif. 8 271-282 (1996); Kaufman, R. J., MoI. Biotechnol. 16 151-161 (2000); Werner, R. G., Drug Res. 48 870-880 (1998).

[0381] The TFcAs may be suitably separated from the culture medium by conventional immunoglobulin purification procedures such as, for example, protein A-Sepharose, hydroxylapatite chromatography, gel electrophoresis, dialysis, or affinity chromatography. DNA and RNA encoding the TFcAs are readily isolated and sequenced using conventional procedures. The hybridoma cells can serve as a source of such DNA and RNA. Once isolated, the DNA may be inserted into expression vectors, which are then transfected into host cells such as HEK 293 cells, CHO cells, or myeloma cells that do not otherwise produce immunoglobulin protein, to obtain the synthesis of recombinant TFcAs in the host cells.

[0382] Aa sequence variants (or mutants) of the TFcAs may be prepared by introducing appropriate nucleotide changes into the TFcA DNA, or by nucleotide synthesis.

[0383] “Host cell” denotes any kind of cellular system which can be engineered to generate the TFcAs described herein. In one embodiment, HEK293 cells and CHO cells are used as host cells. Expression in NSO cells is described by, e.g., Barnes, L. M., et al, Cytotechnology 32 109-123 (2000); Barnes, L. M., et al., Biotech. Bioeng. 73 261-270 (2001). Transient expression is described by, e.g., Durocher, Y., et al., Nucl. Acids. Res. 30 E9 (2002). Cloning of variable domains is described by Orlandi, R., et al., Proc. Natl. Acad. Sci. USA 86 3833-3837 (1989); Carter, P., et al., Proc. Natl. Acad. Sci. USA 89 4285-4289 (1992); and Norderhaug, L., et al., J. Immunol. Methods 204 77-87 (1997). An exemplary transient expression system (HEK 293) is described by Schlaeger, E.-J., and Christensen, K., in Cytotechnology 30 71-83 (1999) and by Schlaeger, E.-J., in J. Immunol. Methods 194 191-199 (1996).

[0384] The control sequences that are suitable for prokaryotes, for example, include a promoter, optionally an operator sequence, and a ribosome binding site. Eukaryotic cells are known to utilize promoters, enhancers and polyadenylation signals.

[0385] A nucleic acid is “operably linked” when it is placed in a functional relationship with another nucleic acid sequence. For example, DNA for a pre-sequence or secretory leader is operably linked to DNA for a polypeptide if it is expressed as a pre-protein that participates in the secretion of the polypeptide; a promoter or enhancer is operably linked to a coding sequence if it affects the transcription of the sequence; or a ribosome binding site is operably linked to a coding sequence if it is positioned so as to facilitate translation. Generally, “operably linked” means that the DNA sequences being linked are contiguous, and, in the case of a secretory leader, contiguous and in reading frame. However, enhancers do not have to be contiguous. Linking is accomplished by ligation at convenient restriction sites. If such sites do not exist, the synthetic oligonucleotide adaptors or linkers are used in accordance with conventional practice.

[0386] Purification of TFcAs may be performed in order to eliminate cellular components or other contaminants, e.g. other cellular nucleic acids or proteins, by standard techniques, including alkaline/SDS treatment, CsCl banding, column chromatography, agarose gel electrophoresis, and others well known in the art. See Ausubel, F., et al., ed. Current Protocols in Molecular Biology, Greene Publishing and Wiley Interscience, New York (1987). Different methods are well established and widespread used for protein purification, such as affinity chromatography with microbial proteins (e.g. protein A or protein G affinity chromatography), ion exchange chromatography (e.g. cation exchange (carboxylmethyl resins), anion exchange (amino ethyl resins) and mixed-mode exchange), thiophilic adsorption (e.g. with beta-mercaptoethanol and other SH ligands), hydrophobic interaction or aromatic adsorption chromatography (e.g. with phenyl-sepharose, aza-arenophilic resins, or m-aminophenylboronic acid), metal chelate affinity chromatography (e.g. with Ni(II)- and Cu(II)-affinity material), size exclusion chromatography, and electrophoretical methods (such as gel electrophoresis, capillary electrophoresis) (Vijayalakshmi, M. A. Appl. Biochem. Biotech. 75 93-102 (1998)).

### Methods of Using TFcAs

[0387] Provided herein are methods of using TFcAs, e.g., TFcBAs. The TFcBAs can be used for treating a disease or disorder associated with receptor dependent signaling, including a variety of cancers.

[0388] In one embodiment, a method is provided for inhibiting proliferation of a tumor cell expressing the targets of a TFcA, e.g., c-Met, ErbB2, ErbB3, ErbB4, IGF1R, IGF2R, Insulin receptor, RON, EGFR, VEGFR1, VEGFR2, TNFR, FGFR1-4, PDGFR (alpha and beta), c-Kit, EPCAM and/or EphA2. A method may comprise contacting the tumor cell with a TFcA such that proliferation of the tumor cell is inhibited, slowed down, or stopped or such that the tumor cell dies.

[0389] Provided herein are methods for treating a disease or disorder associated with the signaling pathway of the targets of a TFcBA, e.g., c-Met, ErbB2, ErbB3, ErbB4, IGF1R, IGF2R, Insulin receptor, RON, EGFR, VEGFR1, VEGFR2, TNFR, FGFR1-4, PDGFR (alpha and beta), c-Kit, EPCAM and/or EphA2, by administering to a patient a TFcBA in an amount effective to treat the disease or disorder. Suitable diseases or disorders include, for example, a variety of cancers including, but not limited to breast cancer and those set forth below. In one embodiment, a method for treating a subject having a proliferative disease, such as cancer, comprises administering to a subject in need thereof a therapeutically effective amount of one or more TFcA.

[0390] Also provided is a method for (or a TFcA, e.g., a medicament for) treating a tumor expressing the target(s) of a TFcA, e.g., a TFcBA, e.g., c-Met, ErbB2, ErbB3, ErbB4, IGF1R, IGF2R, Insulin receptor, RON, VEGFR1, VEGFR2, TNFR, FGFR1-4, PDGFR (alpha and beta), c-Kit, EPCAM, EphA2 and/or EGFR, in a patient, the method comprising administering an amount of a TFcA effective to slow down or stop tumor growth, to stop or to shrink a tumor or to slow or stop tumor invasivness or tumor metastasis). A tumor expressing c-Met, ErbB2, ErbB3, ErbB4, IGF1R, IGF2R, Insulin receptor, RON, VEGFR1, VEGFR2, TNFR, FGFR1-4, PDGFR (alpha and beta), c-Kit, EPCAM, EphA2 and/or EGFR may be treated including tumors of the following cancers: gastric, esophageal, colorectal, non-small cell lung, pancreatic, prostate, renal, and thyroid cancers, hepatocellular carcinoma, glioma/glioblastoma, and breast cancer (basal/triple-negative and HER2+).

[0391] A method of treating a tumor or a subject having a tumor can further comprise administering a second anti-cancer agent in combination with the TFcA. Thus novel compositions are contemplated comprising a TFcA, together with a second anti-cancer agent, typically a biologic agent together with at least one pharmaceutically acceptable carrier or excipient.

[0392] Also provided are kits comprising one or more TFcAs. The kits may include a label indicating the intended use of the contents of the kit and optionally including instructions for use of the kit in treating a disease or disorder associated with a target of a TFcA dependent signaling, e.g., EGFR and/or c-Met dependent signaling. The term label includes any writing, marketing materials or recorded material supplied on or with the kit, or which otherwise accompanies the kit.

### Pharmaceutical Compositions

[0393] In another aspect, a composition, e.g., a pharmaceutical composition, is provided for treatment of a tumor in a patient, as well as methods of use of each such composition to treat a tumor in a patient. The compositions provided herein contain one or more of the antibodies, e.g., TFcAs, disclosed herein, formulated together with a pharmaceutically acceptable carrier. As used herein, “pharmaceutically acceptable carrier” includes any and all solvents, dispersion media, coatings, antibacterial and antifungal agents, isotonic and absorption delaying agents, and the like that are physiologically compatible. Preferably, the carrier is suitable for intravenous, intramuscular, subcutaneous, parenteral, spinal or epidermal administration (e.g., by injection or infusion). Depending on the route of administration, the antibody may be coated in a material to protect it from the action of acids and other natural conditions that may inactivate proteins.

[0394] Pharmaceutical compositions may be administered alone or in combination therapy, i.e., combined with other agents. For example, the combination therapy can include an antibody of the present disclosure with at least one additional therapeutic agent, such as an anti-cancer agent. Pharmaceutical compositions can also be administered in conjunction with another anti-cancer treatment modality, such as radiation therapy and/or surgery.

[0395] A composition of the present disclosure can be administered by a variety of methods known in the art. As will be appreciated by the skilled artisan, the route and/or mode of administration will vary depending upon the desired results.

[0396] To administer a composition provided herein by certain routes of administration, it may be necessary or desirable to coat the antibody with, or co-administer the antibody with, a material to prevent its inactivation. For example, the antibody may be administered to a patient in an appropriate carrier, for example, in liposomes, or a diluent. Pharmaceutically acceptable diluents include saline and aqueous buffer solutions. Liposomes include water-in-oil-in-water CGF emulsions as well as conventional liposomes.

[0397] Pharmaceutically acceptable carriers include sterile aqueous solutions or dispersions and sterile powders for the extemporaneous preparation of sterile injectable solutions or dispersion. The use of such media and agents for pharmaceutically active substances is known in the art. Except insofar as any excipient, diluent or agent is incompatible with the active compound, use thereof in the pharmaceutical compositions provided herein is contemplated. Supplementary active compounds (e.g., additional anti-cancer agents) can also be incorporated into the compositions.

[0398] Therapeutic compositions typically must be sterile and stable under the conditions of manufacture and storage. The composition can be formulated as a solution, microemulsion, liposome, or other ordered structure suitable to high drug concentration. The carrier can be a solvent or dispersion medium containing, for example, water, ethanol, polyol (for example, glycerol, propylene glycol, and liquid polyethylene glycol, and the like), and suitable mixtures thereof. Saline solutions and aqueous dextrose and glycerol solutions can be employed as liquid carriers, particularly for injectable solutions. The composition, if desired, can also contain minor amounts of wetting or solubility enhancing agents, stabilizers, preservatives, or pH buffering agents. In many cases, it will be useful to include isotonic agents, for example, sodium chloride, sugars, polyalcohols such as mannitol, sorbitol, glycerol, propylene glycol, and liquid polyethylene glycol in the composition. Prolonged absorption of the injectable compositions can be brought about by including in the composition an agent that delays absorption, for example, monostearate salts and gelatin.

### EXAMPLES

[0399] The following examples should not be construed as limiting the scope of this disclosure.

[0400] Throughout the examples, the following materials and methods are used unless otherwise stated. In general, the practice of the techniques of the present disclosure employs, unless otherwise indicated, conventional techniques of chemistry, molecular biology, recombinant DNA technology, immunology (especially, e.g., antibody technology), pharmacology, pharmacy, and standard techniques in polypeptide preparation.

### Example 1

### Identification of Stable Tandem Fc Structures

[0401] This example describes the identification of stable multivalent Ab formats. In this Example and in Example 2, protein constructs were used that do not contain binding sites. Several formats were compared, and each of these formats was derived from either one of the following two tandem Fc constructs:

1) TFc “23” or “IgG1 TFc,” which comprises an IgG1 TFc comprising an IgG1 hinge; an IgG1 CH2 domain comprising the substitution N297Q; an IgG1 CH3 domain comprising the substitutions T366S/L368A/Y407V; a TFc linker consisting of (G4S)₈, an IgG1 hinge that does not comprise the upper hinge; an IgG1 CH2 domain comprising the substitution N297Q; and an IgG1 CH3 domain comprising the substitution T366W. This construct comprises the aa sequence set forth as SEQ ID NO:293 (see FIG. 11); and
2) TFc “39” or “IgG1/IgG4 TFc,” which comprises an IgG1/IgG4 tandem TFc comprising a hybrid IgG1/IgG4 hinge comprising an IgG1 upper hinge and a core and lower IgG4 hinge; an IgG4 CH2 domain comprising the substitution T299K; an IgG1 CH3 domain comprising the substitutions T366S/L368A/Y407V; a TFc linker consisting of (G4S)₈; an IgG4 hinge that does not comprise the upper hinge; an IgG4 CH2 domain comprising the substitution T299K; and an IgG1 CH3 domain comprising the substitution T366W. This construct comprises the aa sequence set forth as SEQ ID NO:319 (see FIG. 11).

[0402] Six modified versions of TFc 23 and 39 were created, and these are listed in Table 15. Briefly, a first modification was the addition of a disulfide bond in the viscinity of the knob or hole (TFc 23A). Another modification was the change of the knob hole of 23A for a smaller knob/hole (TFc 23B). Another modification introduced 1 or 2 cysteines in the upper hinge of the first hinge, to create disulfide bridges within the TFc (TFc 23 D and C, respectively). Another modification introduced a C-terminal cysteine in the CH3 domain (TFc 23E). Another modification in the TFc consisted of reducing the length of the TFc linker by 20 aas (TFc 23F, also referred to as “23G”). The aa sequences of these newly modified TFcs (shown in Table 15) are the same as those set forth in FIGS. 6 and 7, except that the TFcs used in this example did not comprise part of the upper hinge, i.e., aas EPKSC, and comprised a signal peptide. The nucleotide and aa sequences of these TFcs are shown in FIG. 11, and the identity of each of the domains or elements of the TFcs is set forth in Tables 12 and 13, with the only difference that the first hinge does not comprise EPKSC at its N-terminus.

TABLE 15
TFcs

| Name of TFc | Modifications to TFc | TFc linker | SEQ ID NO of TFc |
|---|---|---|---|
| 23 | T366S/L368A/Y407V::T366W | (G₄S) ₈ | SEQ ID NO: 293 |
| 39 | | | SEQ ID NO: 319 |
| 23A | Y349C/T366S/L368A/Y407V:: S354C/ | (G₄S) ₈ | SEQ ID NO: 295 |
| 39A | T366W | | SEQ ID NO: 321 |
| 23B | Y407T::T366Y | (G₄S) ₈ | SEQ ID NO: 297 |
| 39B | | | SEQ ID NO: 323 |
| 23C | H224C/T225C/T366S/L368A/Y407V:: | (G₄S) ₈ | SEQ ID NO: 299 |
| 39C | T366W | | SEQ ID NO: 325 |
| 23D | T223C/T366S/L368A/Y407V::T366W | (G₄S) ₈ | SEQ ID NO: 301 |
| 39D | | | SEQ ID NO: 327 |
| 23E | T366S/L368A/Y407V/C-term Cysteine:: | (G₄S) ₈ | SEQ ID NO: 303 |
| 39E | T366W/C-term Cysteine | | SEQ ID NO: 329 |
| 23G* | T366S/L368A/Y407V::T366W | (G₄S) ₄ | SEQ ID NO: 305 |

*23G contains the same TFc as that referred to elsewhere as “23F.”

[0403] The different nucleic acids (having SEQ ID NOs: 292, 294, 296, 298, 300, 302, 304, 318, 320, 322, 324, 326, or 328) were transiently transfected into Freestyle 293F cells (Invitrogen) and purified with a one step protein A purification essentially as follows. The nucleic acids encoding the proteins are cloned as single proteins into the expression plasmid using standard recombinant DNA techniques. An expression vector employed is pCEP4 (Invitrogen). Expression plasmids are transfected using Polyethylene imine (2.5 μg/ml culture) and DNA (1 μg/ml cell culture). Transfected cells are incubated at 37° C., 5% CO₂ for six days and then harvested. All proteins are purified using protein A affinity protocol, in accordance with manufacturer's instructions. The protein A affinity step is used to selectively and efficiently bind the fusion proteins out of harvested cell culture fluids (HCCF). This removes >95% of product impurities in a single step with high yields and high throughput. The portion of desired molecular form for fusion proteins after this step was in the range of 60 to 98 percent. MABSELECT from GE is used as the Protein A affinity resin. The purified material was concentrated and dialyzed into PBS.

### a) Percentage Monomers

[0404] TFc solutions were subjected to the determination of the percentage monomer present by Size Exclusion Chromatography (SEC) either in the initial solution or after incubation at 4° C., 37° C., after freeze-thaw or after gentle agitation on the orbital shaker at room temperature. SEC was performed essentially as follows. SEC is performed using Agilent 1100 Series HPLC system. 50 μg of each molecule is injected on a TSK Super SW3000 gel column (Tosoh Biosciences, P/N 18675). PBS is used as running and equilibration buffer at a flow rate of 0.35 ml/min.

[0405] Table 16 provides the percentage monomer of exemplary TFcs in initial solutions at the indicated concentrations.

TABLE 16
Percentage monomer of exemplary TFcs

| | | % monomer |
|---|---|---|
| Protein | Concentration | at 0 days |
| 23G | 3 mg/ml | 87.9 |
| 23 | 5 mg/ml | 71.4 |
| 39C | 0.5 mg/ml | 39.5 |
| 39D | 0.5 mg/ml | 50.9 |
| 39 | 12.5 mg/ml | 66.4 |

[0406] In another experiment, the percentage monomer was determined in the initial solution after concentration of the molecules essentially as described above. Table 17 provides the results.

TABLE 17
Percentage monomer in initial solution after concentration

| | mg/ml | % monomer |
|---|---|---|
| 23A | 5.2 | 67% |
| 23D | 10.0 | 78% |
| 23E | 16.8 | 74% |

[0407] A compilation of Tables 16 and 17 is shown below in Table 18

TABLE 18
Percentage monomer of exemplary TFcs

| | Initial | % monomer at | Second | % monomer |
|---|---|---|---|---|
| | Concentration | initial | concentration | at second |
| Protein | (mg/ml) | concentration | (mg/ml) | concentration |
| 23 | 5.0 | 71.4% | | |
| 23A | 0.23 | 83.7% | 5.2 | 67% |
| 23B | 1.22 | 58.2% | | |
| 23C | 5.0 | 74.6% | | |
| 23D | 0.32 | 82.0% | 10.0 | 78% |
| 23E | 0.74 | 77.5% | 16.8 | 74% |
| 23G | 0.27 | 87.9% | | |
| 39 | 12.5 | 66.4% | | |
| 39A | n/d | n/d | | |
| 39B | 0.95 | 55.0% | | |
| 39C | 0.5 | 74.6% | | |
| 39D | 0.5 | 50.9% | | |
| 39E | 0.95 | 55.0% | | |
| 39G | 0.27 | 74.8% | | |

Table 19 shows the percentage monomer of TFcs 39E and 23C in solution as determined after having been exposed to various conditions.

TABLE 19
Percentage monomer of 39E and 23C after exposure to various conditions

| | 39E | |
|---|---|---|
| | 12.9 | 23C |
| Condition | mg/ml | 5 mg/ml |
| 0 days | 89.7% | 74.6% |
| 4° C., 2 weeks | 90.6% | 82.5% |
| Room temp., 10 | 90.3% | 83.0% |
| days | | |
| 37° C., 2 weeks | 88.1% | — |
| Freeze/thaw | 90.9% | 85.0% |
| Agitate | 90.7% | — |

[0408] The results indicate that the TFcs have very different stabilities in the solution at day 0 and under the various conditions tested. 39E and 23G appear to have better stability than others.

### B) SDS PAGE Analysis

[0409] The TFcs were run on a 4-12% SDS-PAGE gel in non-denaturing conditions and visualized by Coomassie stain. The results are shown in FIG. 8.

### Example 2

### Synthesis of Second Generation TFcs

[0410] To further improve the characteristics of the TFc molecules, further modifications were made to them. The modifications included (i) varying the length of the TFc linker (“23E (35L)”, “39E (35L)”, “23E (30L)”, “39E (30L)”, “23E (25L)” and “39E (25L)”); (ii) changing the combination of AEMs and C-terminal cysteine modifications within each of the two CH3 domains (“23E (35L) Inverted” and (“39E (35L) Inverted”); and (iii) changing the mutations that enhance CH3 association (“23I”, “39I”, “23J” and “39J”). These modifications are summarized in Table 20. The aa sequences of these newly modified TFcs are set forth in FIG. 11 and the identity of each of their domains or elements is set forth in Tables 12 and 13.

TABLE 20
Second generation TFcs

| Name of TFcBA | Modifications to TFc | TFc linker | SEQ ID NO of TFc |
|---|---|---|---|
| 23E (35L) | T366S/L368A/Y407V/C-term Cysteine | (G₄S) ₇ | SEQ ID NO: 185 |
| 39E (35L) | KSCDKT::T366W/C-term Cysteine GEC | | SEQ ID NO: 211 |
| 23E (35L) | T366S/L368A/Y407V/C-term Cysteine | (G₄S) ₇ | SEQ ID NO: 187 |
| Inverted 39E | GEC::T366W/C-term Cysteine KSCDKT | | SEQ ID NO: 213 |
| (35L) Inverted | | | |
| 23E (30L) | T366S/L368A/Y407V/C-term Cysteine | (G₄S) ₆ | SEQ ID NO: 189 |
| 39E (30L) | KSCDKT::T366W/C-term Cysteine GEC | | SEQ ID NO: 215 |
| 23E (25L) | T366S/L368A/Y407V/C-term Cysteine | (G₄S) ₅ | SEQ ID NO: 191 |
| 39E (25L) | KSCDKT::T366W/C-term Cysteine GEC | | SEQ ID NO: 217 |
| 23I | S364H/F405A::Y349T/T394F | (G₄S) ₈ | SEQ ID NO: 193 |
| 39I | | | SEQ ID NO: 219 |
| 23J | K370D/K392D/K409D::E356K/E357K/D399K | (G₄S) ₈ | SEQ ID NO: 195 |
| 23J | | | SEQ ID NO: 221 |

[0411] The second generation TFcs were expressed and purified essentially as described in Example 1.

[0412] A) Percentage Monomers

[0413] TFc solutions were subjected to the determination of the percentage monomer present by SEC either in the initial solution or after 7 days at 4° C. SEC was performed essentially as described in Example 1.

[0414] Table 21 provides the percentage monomer of exemplary second generation TFcs in initial solutions and after 7 days at 4° C.

TABLE 21
Percentage monomer of exemplary TFcs

| | | Day 1 | Day 7 |
|---|---|---|---|
| Fc1 | 23E/25L | 74.8% | |
| Fc2 | 23E/35L | Not measured | 77.9% |
| Fc3 | 39E/30L | 80.2% | |
| Fc4 | 39E/35L | Not measured | 78.9% |
| Fc5 | 39E/35L inv | 79.3% | |
| Fc6 | 23E/30L | 80.2% | |
| Fc7 | 23E/35L inv | 79.1% | |
| Fc8 | 39E/25L | 78.1% | |
| Original IgG1 Fc | 23E/40L | 78.8% | |
| Original IgG1/4 Fc | 39E/40L | 88.3% | |

[0415] The results indicate that a 40 aa linker, e.g., in molecules 23E and 39E, results in a more stable TFc than a shorter linker

### Example 3

### Exemplary Anti-c-Met/Anti-EGFR TFcBAs

### a) Exemplary Anti-c-Met Binding Sites

[0416] A TFcBA may comprise an anti-c-Met binding site comprising or consisting of that of the humanized 5D5 Ab (U.S. Pat. No. 7,476,724). The heavy chain may comprise the following Fab domain or VH domain thereof:

1) Without signal peptide:

[chemical structure]

VKDYFPEPVTVSWNSGALTSGVHTFPAVLQSSGLYSLSSVVTVPSSSLG
TQTYICNVNHKPSNTKVDKKV
(SEQ ID NO: 223; the CDRs are underlined with a
dotted line, and the CH1 domain is underlined)
2) Including the exemplary signal peptide
consisting of SEQ ID NO: 241 (underlined):

[chemical structure]

PLAPSSKSTSGGTAALGCLVKDYFPEPVTVSWNSGALTSGVHTFPAVLQ
SSGLYSLSSVVTVPSSSLGTQTYICNVNHKPSNTKVDKKV
(SEQ ID NO: 245; the signal peptide is underlined
and boldface, the CDRs are underlined with a
dotted line, and the CH1 domain is underlined)

The light chain may comprise the following Fab domain or VH domain thereof:

1) Without signal peptide:

[chemical structure]

REAKVQWKVDNALQSGNSQESVTEQDSKDSTYSLSSTLTLSKADYEKHK
VYACEVTHQGLSSPVTKSFNRGEC
(SEQ ID NO: 231; the CDRs are underlined with a
dotted line, and the CL domain is underlined)
2) Including the exemplary signal peptide
consisting of SEQ ID NO: 243:

[chemical structure]

DEQLKSGTASVVCLLNNFYPREAKVQWKVDNALQSGNSQESVTEQDSKD
STYSLSSTLTLSKADYEKHKVYACEVTHQGLSSPVTKSFNRGEC
(SEQ ID NO: 247; the signal peptide is underlined
and boldface, the CDRs are underlined with a
dotted line, and the CL domain is underlined)

A TFcBA may also comprise an anti-c-Met binding site comprising or consisting of the following heavy and light chain portions, and referred to herein as “anti-c-Met binding site 2.” The heavy chain may comprise the following Fab domain or VH domain thereof:

1) Without signal peptide:

[chemical structure]

KDYFPEPVTVSWNSGALTSGVHTFPAVLQSSGLYSLSSVVTVPSSSLGT
QTYICNVNHKPSNTKVDKKV
(SEQ ID NO: 287; the CDRs are underlined with a
dotted line, and the CH1 domain is underlined)
2) Including the exemplary signal peptide
consisting of SEQ ID NO: 241 (underlined):

[chemical structure]

LAPSSKSTSGGTAALGCLVKDYFPEPVTVSWNSGALTSGVHTFPAVLQS
SGLYSLSSVVTVPSSSLGTQTYICNVNHKPSNTKVDKKV
(SEQ ID NO: 256; the signal peptide is underlined
and boldface; the CDRs are underlined with a
dotted line, and the CH1 domain is underlined)

The light chain may comprise the following Fab domain or VH domain thereof:

1) Without signal peptide:

[chemical structure]

AKVQWKVDNALQSGNSQESVTEQDSKDSTYSLSSTLTLSKADYEKHKVY
ACEVTHQGLSSPVTKSFNRGEC
(SEQ ID NO: 289; the CDRs are underlined with a
dotted line, and the CL domain is underlined)
2) Including the exemplary signal peptide
consisting of SEQ ID NO: 243:

[chemical structure]

QLKSGTASVVCLLNNFYPREAKVQWKVDNALQSGNSQESVTEQDSKDST
YSLSSTLTLSKADYEKHKVYACEVTHQGLSSPVTKSFNRGEC
(SEQ ID NO: 345; the signal peptide is underlined
and boldface; the CDRs are underlined with a
dotted line, and the CL domain is underlined)

[0417] The aa sequences of the heavy chain of an exemplary mature TFcBA comprising in amino to carboxy terminal order: i) the Fab domain of the anti-c-Met binding site 5D5 (SEQ ID NO:223); ii) a TFc comprising AEM 1 and DiS 2 (SEQ ID NO:181); and iii) the panitumumab anti-EGFR scFv H1L1 having SEQ ID NO:233 (see below) is set forth as SEQ ID NO:235 (FIG. 9). The aa sequences of the heavy chain of an exemplary mature TFcBA comprising in amino to carboxy terminal order: i) the Fab domain of the anti-c-Met binding site 2 (SEQ ID NO:287), ii) a TFc comprising AEM 1 and DiS 2 (SEQ ID NO:181); and iii) the cetuximab anti-EGFR scFv H1L1 having SEQ ID NO:258 (see below) is set forth as SEQ ID NO:291 (FIG. 9). Generally, the exemplary anti-c-Met Fab heavy chain sequences provided here may be linked to any of the TFcs, or constructs comprising a TFc, disclosed herein. These proteins may be expressed with a signal sequence, which may be the signal sequence consisting of SEQ ID NO:241.

B) Exemplary Anti-EGFR scFvs
A TFcBA may comprise any of the following anti-EGFR scFvs (or variable domains or CDRs thereof):

1) Panitumumab (VECTIBIX) scFv
The aa sequence of the VH and VL domains of
panitumumab is provided in U.S. Pat. No.
6,235,883, and are assembled into an scFv having
the following aa sequence:

[chemical structure]

EIKRT
(SEQ ID NO: 233; the scFv linker is in italics
and the VH and VL CDRs are underlined with a
dotted line)
2) 2224 scFv
The aa sequence of the VH and VL domains of Ab
2224 is provided in US Patent Publication No
2010/0009390, and are assembled into an scFv
having the following aa sequences:

[chemical structure]

(SEQ ID NO: 237; the scFv linker is in italics
and the VH and VL CDRs are underlined with a
dotted line)
3) Humanized Cetuximab (ERBITUX) scFv
The variable regions of Cetuximab were humanized
and used for constructing the following scFvs,
wherein the CDRs are underlined with dotted
lines, the scFv linker is italicized and aa
modifications resulting from the humanization are
in lower case letters:
3.1) Cetuximab scFv H1 L1

[chemical structure]

VEIKRT
(SEQ ID NO: 258)
3.2) Cetuximab scFv H1 L2

[chemical structure]

lEIKRT
(SEQ ID NO: 275)
3.3) Cetuximab scFv H2 L1

[chemical structure]

VEIKRT
(SEQ ID NO: 277)
3.4) Cetuximab scFv H2 L2

[chemical structure]

lEIKRT
(SEQ ID NO: 279)

[0418] The VH and VL domains of the humanized Cetuximab Abs may be used in any other format of Ab, e.g., an Ab having a naturally occurring structure comprising two heavy chains and two light chains.

[0419] The aa sequence of the heavy chain of an anti-c-Met/anti-EGFR TFcBA comprising i) the humanized 5D5 anti-c-Met VH domain (SEQ ID NO:223); ii) a TFc comprising AEM 1 and DiS 2 (SEQ ID NO:181); and iii) the panitumumab anti-EGFR scFv having SEQ ID NO:233 is set forth as SEQ ID NO:235 (FIG. 9). The aa sequences of the heavy chain of anti-c-Met/anti-EGFR TFcBAs comprising the same binding sites as those in SEQ ID NO:235, but comprising a different TFc are set forth in SEQ ID NOs: 343, 225, 227 and 229 (FIG. 9). The aa sequence of the heavy chain of an anti-c-Met/anti-EGFR TFcBA comprising i) the humanized 5D5 anti-c-Met VH domain (SEQ ID NO:223); ii) a TFc comprising AEM 1 and DiS 2 (SEQ ID NO:181); and iii) the 2224 anti-EGFR scFv having SEQ ID NO:237 is set forth as SEQ ID NO:239 (FIG. 9). The aa sequences of the heavy chain of an anti-c-Met/anti-EGFR TFcBA comprising i) the humanized 5D5 anti-c-Met VH domain (SEQ ID NO:223); ii) a TFc comprising AEM 1 and DiS 2 (SEQ ID NO:181); and iii) a cetuximab anti-EGFR scFv consisting of SEQ ID NO:258, 275, 277 or 279 are set forth as SEQ ID NOs:260, 281, 283 and 285, respectively (FIG. 9). Generally any of the anti-EGFR scFvs disclosed herein, or their variable or CDR sequences, may be linked to any of the TFcs, or constructs comprising a TFc, disclosed herein.

Nucleotide sequences encoding the Fab domains, scFvs and TFcBAs are provided in FIG. 10.

[0420] Other exemplary anti-c-Met/anti-EGFR TFcBAs are set forth in Table 21, wherein each of the sequences may be connected to the adjacent sequence in amino to carboxy terminal order without intervening sequence.

TABLE 21
Exemplary TFcBAs

| Anti-c-Met heavy | | Connecting | Anti-EGFR |
|---|---|---|---|
| chain Fab | TFc | linker | scFv |
| Humanized 5D5 (SEQ | IgG1 TFc (SEQ ID NO: 171, 173, 175, 177, 179, | (G4S)2 | Panitumumab |
| ID NO: 223 or 245) | 181, 183, 185, 187, 189, 191, 193 or 195) or | | (SEQ ID |
| with light chain having | IgG1/IgG4 hybrid IFc (SEQ ID NO: 197, 199, | | NO: 233) |
| SEQ ID NO: 231 or | 201, 203, 205, 207, 209, 211, 213, 215, 217, 219 | | |
| 247 | or 221) | | |
| Humanized 5D5 (SEQ | IgG1 TFc (SEQ ID NO: 171, 173, 175, 177, 179, | (G4S)2 | 2224 (SEQ ID |
| ID NO: 223 or 245) | 181, 183, 185, 187, 189, 191, 193 or 195) or | | NO: 237) |
| with light chain having | IgG1/IgG4 hybrid IFc (SEQ ID NO: 197, 199, | | |
| SEQ ID NO: 231 or | 201, 203, 205, 207, 209, 211, 213, 215, 217, 219 | | |
| 247 | or 221) | | |
| Humanized 5D5 (SEQ | IgG1 TFc (SEQ ID NO: 171, 173, 175, 177, 179, | (G4S)2 | Cetuximab |
| ID NO: 223 or 245) | 181, 183, 185, 187, 189, 191, 193 or 195) or | | H1L1 (SEQ ID |
| with light chain having | IgG1/IgG4 hybrid IFc (SEQ ID NO: 197, 199, | | NO: 258) |
| SEQ ID NO: 231 or | 201, 203, 205, 207, 209, 211, 213, 215, 217, 219 | | |
| 247 | or 221) | | |
| Humanized 5D5 (SEQ | IgG1 TFc (SEQ ID NO: 171, 173, 175, 177, 179, | (G4S)2 | Cetuximab |
| ID NO: 223 or 245) | 181, 183, 185, 187, 189, 191, 193 or 195) or | | H1L2 (SEQ ID |
| with light chain having | IgG1/IgG4 hybrid IFc (SEQ ID NO: 197, 199, | | NO: 275) |
| SEQ ID NO: 231 or | 201, 203, 205, 207, 209, 211, 213, 215, 217, 219 | | |
| 247 | or 221) | | |
| Humanized 5D5 (SEQ | IgG1 TFc (SEQ ID NO: 171, 173, 175, 177, 179, | (G4S)2 | Cetuximab |
| ID NO: 223 or 245) | 181, 183, 185, 187, 189, 191, 193 or 195) or | | H2L1 (SEQ ID |
| with light chain having | IgG1/IgG4 hybrid IFc (SEQ ID NO: 197, 199, | | NO: 277) |
| SEQ ID NO: 231 or | 201, 203, 205, 207, 209, 211, 213, 215, 217, 219 | | |
| 247 | or 221) | | |
| Humanized 5D5 (SEQ | IgG1 TFc (SEQ ID NO: 171, 173, 175, 177, 179, | (G4S)2 | Cetuximab |
| ID NO: 223 or 245) | 181, 183, 185, 187, 189, 191, 193 or 195) or | | H2L2 (SEQ ID |
| with light chain having | IgG1/IgG4 hybrid IFc (SEQ ID NO: 197, 199, | | NO: 279) |
| SEQ ID NO: 231 or | 201, 203, 205, 207, 209, 211, 213, 215, 217, 219 | | |
| 247 | or 221) | | |
| Binding site 2 (SEQ | IgG1 TFc (SEQ ID NO: 171, 173, 175, 177, 179, | (G4S)2 | Panitumumab |
| ID NO: 287 or 256) | 181, 183, 185, 187, 189, 191, 193 or 195) or | | (SEQ ID |
| with light chain having | IgG1/IgG4 hybrid IFc (SEQ ID NO: 197, 199, | | NO: 233) |
| SEQ ID NO: 289 or | 201, 203, 205, 207, 209, 211, 213, 215, 217, 219 | | |
| 345 | or 221) | | |
| Humanized 5D5 (SEQ | IgG1 TFc (SEQ ID NO: 171, 173, 175, 177, 179, | (G4S)2 | 2224 (SEQ ID |
| ID NO: 223 or 245) | 181, 183, 185, 187, 189, 191, 193 or 195) or | | NO: 237) |
| with light chain having | IgG1/IgG4 hybrid IFc (SEQ ID NO: 197, 199, | | |
| SEQ ID NO: 231 or | 201, 203, 205, 207, 209, 211, 213, 215, 217, 219 | | |
| 247 | or 221) | | |
| Humanized 5D5 (SEQ | IgG1 TFc (SEQ ID NO: 171, 173, 175, 177, 179, | (G4S)2 | Cetuximab |
| ID NO: 223 or 245) | 181, 183, 185, 187, 189, 191, 193 or 195) or | | H1L1 (SEQ ID |
| with light chain having | IgG1/IgG4 hybrid IFc (SEQ ID NO: 197, 199, | | NO: 258) |
| SEQ ID NO: 231 or | 201, 203, 205, 207, 209, 211, 213, 215, 217, 219 | | |
| 247 | or 221) | | |
| Humanized 5D5 (SEQ | IgG1 TFc (SEQ ID NO: 171, 173, 175, 177, 179, | (G4S)2 | Cetuximab |
| ID NO: 223 or 245) | 181, 183, 185, 187, 189, 191, 193 or 195) or | | H1L2 (SEQ ID |
| with light chain having | IgG1/IgG4 hybrid 11-c (SEQ ID NO: 197, 199, | | NO: 275) |
| SEQ ID NO: 231 or | 201, 203, 205, 207, 209, 211, 213, 215, 217, 219 | | |
| 247 | or 221) | | |
| Humanized 5D5 (SEQ | IgG1 TFc (SEQ ID NO: 171, 173, 175, 177, 179, | (G4S)2 | Cetuximab |
| ID NO: 223 or 245) | 181, 183, 185, 187, 189, 191, 193 or 195) or | | H2L1 (SEQ ID |
| with light chain having | IgG1/IgG4 hybrid IFc (SEQ ID NO: 197, 199, | | NO: 277) |
| SEQ ID NO: 231 or | 201, 203, 205, 207, 209, 211, 213, 215, 217, 219 | | |
| 247 | or 221) | | |
| Humanized 5D5 (SEQ | IgG1 TFc (SEQ ID NO: 171, 173, 175, 177, 179, | (G4S)2 | Cetuximab |
| ID NO: 223 or 245) | 181, 183, 185, 187, 189, 191, 193 or 195) or | | H2L2 (SEQ ID |
| with light chain having | IgG1/IgG4 hybrid IFc (SEQ ID NO: 197, 199, | | NO: 279) |
| SEQ ID NO: 231 or | 201, 203, 205, 207, 209, 211, 213, 215, 217, 219 | | |
| 247 | or 221) | | |

### Example 4

### Methods for Preparing and Characterizing TFcAs or TFcs

### a) Protein Expression and Purification

[0421] Stable Transfection Nucleic acids are transfected into CHO-K1 cells (Chinese hamster ovary; ATCC® cat #CCL-61™) using 1:1(:1) plasmid ratio, and are purified with a one step protein A purification method, e.g., according to the following protocol. The nucleic acids encoding the TFcAs or TFcs are cloned as single proteins into the expression plasmids using standard recombinant DNA techniques. An exemplary expression vector employed is pMP 10K (SELEXIS). Expression plasmids are linearized, purified using QIAquick® purification kit (QIAGEN), and co-transfected into CHO-K1 cells using Lipofectamine® LTX (Invitrogen). Transfected cells are recovered with Ham's F12 medium (Gibco®) containing 10% FBS for 2 days without selection pressure, then with selection pressure for 4 days. After 4 days, they are changed into serum-free medium (Hyclone®) containing glutamine with selection pressure. After a week, cells are checked for expression and scaled up to desired volume. All proteins are purified using protein A affinity protocol, carried out in accordance with manufacturer's instructions. The protein A affinity step is used to selectively and efficiently bind the TFcA or TFc proteins out of harvested cell culture fluids (HCCF). This removes >95% of product impurities in a single step with high yields and high throughput. The portion of desired molecular form for TFcAs or TFcs after this step is expected to be in the range of 60 to 98 percent. MABSELECT from GE is used as the Protein A affinity resin. The purified material is concentrated and dialyzed into PBS.

[0422] Transient transfection: Nucleic acids are transiently transfected into Freestyle™ 293F cells (Invitrogen) and purified with a one-step protein A purification essentially as follows. The nucleic acids encoding the proteins are cloned as single proteins into the expression plasmid using standard recombinant DNA techniques. An exemplary expression vector employed is pCEP4 (Life Technologies cat #R790-07). Expression plasmids are transfected using Polyethylene imine (2.5 μg/ml culture) and DNA (1 μg/ml cell culture). Transfected cells are incubated at 37° C., 5% CO₂ for six days and then harvested. All proteins are purified using protein A affinity protocol, in accordance with manufacturer's instructions. The protein A affinity step is used to selectively and efficiently bind the fusion proteins out of harvested cell culture fluids (HCCF). This removes >95% of product impurities in a single step with high yields and high throughput. MABSELECT from GE is used as the Protein A affinity resin. The purified material is concentrated and dialyzed into PBS.B) SDS-PAGE analysis

[0423] TFcBAs or TFcs are run on a 4-12% SDS-PAGE gel in non-denaturing conditions and visualized by Coomassie stain. This method may be used to determine whether a TFcA or TFc is properly formed or assembled.

### C) Thermal Stability Measurement by DSF

[0424] The temperature at which a TFcA or TFc unfolds is determined by Differential Scanning Fluorimetry (DSF) essentially as follows. The DSF assay is performed in the IQ5 Real Time Detection System (Bio-Rad). 20 μl solutions of 15 uM TFcA or TFc, 1× Sypro Orange (Invitrogen Life Technologies), and 1×PBS are added to the wells of a 96 well plate. The plate is heated from 20° C. to 90° C. with a heating rate of 1° C./min. Data is transferred to GraphPad Prism® for analysis.

D) pEGFR Inhibition

[0425] Inhibition of signal transduction through EGFR, e.g., ligand-induced signal transduction, by a TFcBA may be determined by measuring the effect of the particular TFcA on the phosphorylation of EGFR.

[0426] The following protocol is used to measure inhibition of EGFR. Cells (e.g. A431 cells (ATCC® cat #CRL-1555™) or NCI-H322M (National Cancer Institute)) are maintained in DMEM medium supplemented with 10% fetal bovine serum, Penicillin/Streptomycin and L-glutamine. For signaling experiments, 3.5×10⁴ cells are plated in complete medium in 96-well tissue culture plates. The following day, complete medium is replaced with serum-free medium, and cells are incubated overnight at 37° C. Cells are pretreated for 2 hours with starting concentration of 300 nM and titrating 3-fold down for an 11 concentration dose for each TFcA or TFc, and then stimulated for 10 minutes with 8 nM EGF (Human recombinant EGF; Cat# AF-100-15; PeproTech, Inc.). Cells are washed with PBS and lysed in MPER buffer (cat #PI78505, VWR International) supplemented with protease and phosphatase inhibitors (cOmplete™ Protease Inhibitor Cocktail Tablet provided in EASY packs, cat #4693124001, Roche Diagnostics Corp; PhosSTOP® Phosphatase Inhibitor Cocktail Tablets, cat #4906837001, Roche Diagnostics Corp). ELISAs for phospho-EGFR (pEGFR) are performed according to the manufacturer's protocols (pEGFR ELISA R&D kit (cat #: DYC1095-C)), with the exception that the capture Ab is EGFR Ab-11, Clone: 199.12 (Fisher Scientific Cat# MS396P1ABX). SuperSignal® ELISA Pico Chemiluminescent Substrate (cat #PI37069, VWR International) is added and plates read on a PerkinElmer Envision plate reader. Luminescence values are plotted following normalization to the observed signal at the lowest concentration of TFcA or TFc. For data analyses, duplicate samples are averaged and error bars are used to represent the standard deviation between the two replicates Inhibition curves and corresponding IC50 values are calculated using GraphPad Prism® software (GraphPad Software, Inc.) via regression of the data to a 4 parameter logistic equation. To calculate percent inhibition, regressed values of maximal (‘max’) and minimum (‘min’) inhibitor potency can be utilized as follows:

curve_span=max−min;
baseline_span=max;
percent_inhibition=100*curve_span/baseline_span.
E) pERK Inhibition

[0427] Inhibition of signal transduction through c-Met and/or EGFR, e.g., ligand-induced signal transduction, by a TFcA may may be determined by measuring the effect of the particular TFcA on the phosphorylation of ERK. The following protocol may be used to measure inhibition of pERK. Day 1: Actively midlog (about 80% confluency) growing cells (e.g., A431 cells) are split in DMEM (+10% FBS+L/glutamine+Pen/Strep) media. Approximately 35,000 cells are seeded/well in a 96 well-plate. Day 2: The media is changed from 10% FBS to serum-free media −0.5% FBS (+L/glutamine+Pen/Strep) media. Day 3: The inhibitors/antibodies are diluted into the appropriate volume of serum media. 100 μL of each inhibitor per concentration is added/well. The inhibitor is allowed to incubate at 37° C. for 2 hours. At the end of the 2 hour period, a final concentration of 8 nM EGF (Human recombinant EGF; Cat# AF-100-15; PeproTech, Inc.) is added to each inhibitor and each concentration of inhibitor for 10 min. The cells are washed 2× with cold PBS and later lysed in 40 μL/well of SureFire® Lysis buffer (a 1:5 dilution of stock with water). The lysates are place in −80° C. usually within 5 min after lysis. Day 4: The protocol on performing the SureFire® pERK 1/2 ELISA can be found in Perkin Elmer website (ALPHASCREEN PROTEIN A 10K PTS PerkinElmer Life Sciences, Inc. Cat #: 6760617M; TGR Surefire ERK1 384 Kit for 10,000 Ass; PerkinElmer Life Sciences, Inc. Cat #: TGRES10K). Essentially, the −80° C. lysate is thawed at room temperature. In the meantime, the reaction buffer is prepared in which the Activation Buffer and Reaction Buffer are mixed according to protocol. The Protein A detection kit reagents are added last to the reaction buffer prior to adding onto the 384 well plate. 4 μL of the thawed lysate is transferred onto a ProxiPlate® 384, white shallow well plate (from Perkin Elmer; cat #6008280). After addition of the Protein A detection kit reagents, 7 μL of the final reaction buffer is transferred to each well (which already has 4 μL of the lysate in them). The plates are sealed tightly with aluminum sealer. The plate is spun down in an Eppendorf table top centrifuge at 1800 rpms for 1 minute. The plates are gently shaken at RT for 2 hours. The plates are then read in Perkin Elmer Envision® Reader. Normalization of luminescence data and calculation of IC50 occurs as described for pEGFR.

### Example 5

### Protocols for Measurement of ELISA Plate-Based Antibody Binding

[0428] Binding of Bispecific Antibodies to Soluble cMet-Fc and EGFR-his

[0429] Reacti-bind® plates (96 well) are coated with 50 μL of cMet-Fc (2 μg/mL in PBS), and incubated overnight at 4° C. Next day, the plates are washed with PBS-T (PBS+0.05% Tween-20), blocked for 1 hour at room temperature with 100 μL of blocking buffer, and washed again with PBS-T. Plates are incubated with 50 μL of bispecific antibodies at room temperature for 2 hours, and then washed with PBS-T. Antibody concentrations start at 500 nM (in PBS-T), and include ten additional two-fold dilutions and one blank (PBS-T only). Plates are then incubated with 50 μL of EGFR-his (at 1 μg/ml in PBS-T for one hour at room temperature. The plates are washed with PBS-T and then incubated with anti-his-HRP antibody diluted 1:10,000 in PBS-T for 1 hour at room temperature, and washed again with PBS-T. The plates are incubated with 100 μL of TMB substrate for 5-10 minutes at room temperature and the reaction is stopped by adding 100 μL of Stop solution. The absorbance was measured at 450 nm, and the resulting data analyzed using GraphPad Prism®.

[0430] Exemplary results using TFcBAs in the method above can be seen in FIG. 15, which shows binding affinity of onartuzumab-39Egy-2224 (squares) and onartuzumab-39Egy4-panitumumab (circles).

### Example 6

### Current Technologies for Asymmetric Fc-Domains Give Molecular Weight Heterogeneity

### Stable Transfection of CHO-K1 Cells

[0431] Suspension-adapted CHO-K1 cells are grown in Hyclone® Media supplemented with 8 mM L-glutamine to a density of 2 million/mL. On the day of transfection, the cells are resuspended in a serum-free media (Opti-MEM® I) at a density of 80,000 cells/mL. The cells (500mL) are then transfected with 1 μg of total DNA (including 10 ng of pNeo vector, an in-house vector carrying the geneticin selection marker) using 2.75mL of Lipofectamin®e in a 24 well plate. After 3 hours, 1 mL of recovery media (HAMS-F12+10% FBS) is added, and the transfected cells allowed to recover for 48 hours. The cells are then expanded into a 96-well plate, and the selection marker geneticin was added to the recovery media at 500 μg/ml. After 4 more days, the media is replaced with serum free Hyclone media (supplemented with L-glutamine), and the transfected cells allowed to adapt. After a week, the selected cells form colonies, and the wells are tested for desired characteristics with western blots from the supernatant. The desired clones are expanded to a 24-well plate, then to a T-25 flask, and eventually to a shake flask. The desired clones are confirmed with SDS-PAGE, and scaled up to the desired volume. The cells are harvested by centrifugation (6000 g, 30 min) when the viability falls below 80%, and the supernatant filtered using a 0.22 μm filter.

[0432] Cells were transfected as described aboved and analyzed as follows. Results are shown in Table 22 below.

[0433] A) Western Blot Protocol
[0434] Cell supernatants expressing onartuzumab were run on a 4-12% SDS-PAGE gel in non-denaturing conditions. The proteins were transferred to nitrocellulose paper using the Invitrogen iBlot®. The blot was washed with PBS-T and then incubated for one hour with anti-human-FC conjugated to IRD700. The blot was washed three times with PBS-T and then imaged using the L1-Cor® Odyssey®. The results are shown in FIG. 12.

[0435] B) Percentage Monomers
[0436] TFc solutions were subjected to the determination of the percentage monomer present by SEC in the initial solution. SEC was performed essentially as described in Example 1.
[0437] Table 22 provides the percentage monomer of exemplary second generation TFcs in initial solutions.

TABLE 22
Percentage monomer of exemplary onartuzumab clones

| Protein | High MW species | % monomer | Low MW species |
|---|---|---|---|
| Onartuzumab1 | | 78 | 22 |
| Onartuzumab2 | | 75 | 25 |
| Onartuzumab3 | | n/d | |
| Onartuzumab4 | | 24 | 75 |
| Onartuzumab5 | | 89 | 11 |
| Onartuzumab6 | 2.2 | 98 | |

### Example 7

### Production and Analysis of Charged Aglycosylation Mutants

[0438] The identification of stable multivalent Ab formats is described below. Protein constructs were used that do not contain binding sites. Several formats were compared as shown in Table 23 and FIG. 17.

TABLE 23
TFcs

| Name of | Modifications to TFc | SEQ ID NOs of TFc |
|---|---|---|
| tandem Fc | CH2 domain | (aa/nucleotide) |
| Glyco_wt | None | 357/358 |
| Glyco_1 | N297D/T299S::N297D/T299S | 388/389 |
| Glyco_2 | T299K::N297D/T299S | 390/391 |
| Glyco_3 | N297D/T299S::T299K | 392/393 |
| Glyco_4 | N299K::N299D | 394/395 |
| Glyco_5 | N299D::N299K | 396/397 |
| Glyco_6 | N299D::N299D | 398/399 |

[0439] Nucleic acids (having SEQ ID NOs:357, and 389-399 (odd numbers) were transiently transfected into Freestyle™ 293F cells and purified with a one-step protein A purification followed by DSF essentially as described in Example 4.

TABLE 24
Percentage monomer of TFcs after exposure to various conditions

| Protein | Condition | mg/ml | % monomer |
|---|---|---|---|
| Glyco_wt | Initial purification | 10.6 | 86.6 |
| | 4 deg, 0 day | 10.6 | 79.7 |
| | Agitate | 10.6 | 79.3 |
| | 4 deg, 10 day | 10.6 | 78.6 |
| | 37 deg, 10 day | 10.6 | 75.5 |
| | 4 deg, 1 month | 10.6 | 77.5 |
| Glyco_1 | Initial purification | 3.7 | 83.2 |
| | 4 deg, 0 day | 11.2 | 83.0 |
| | Agitate | 11.2 | 82.6 |
| | 4 deg, 10 day | 11.2 | 82.4 |
| | 37 deg, 10 day | 11.2 | 80.3 |
| | 4 deg, 1 month | 11.2 | 84.7 |
| Glyco_2 | Initial purification | 1.3 | 78.6 |
| | 4 deg, 0 day | 8.4 | 78.0 |
| | Agitate | 8.4 | n/d |
| Glyco_3 | Initial purification | 3 | 76.4 |
| | 4 deg, 0 day | 12 | 75.0 |
| | Agitate | 12 | n/d |
| | 4 deg, 10 day | 12 | 73.5 |
| | 37 deg, 10 day | 12 | 71.6 |
| Glyco_4 | Initial purification | 4.2 | 84.5 |
| | 4 deg, 0 day | 10.1 | 83.5 |
| | Agitate | 10.1 | 83.6 |
| | 4 deg, 10 day | 10.1 | 83.0 |
| | 37 deg, 10 day | 10.1 | 80.8 |
| Glyco_5 | Initial purification | 9.5 | 77.1 |
| | 4 deg, 0 day | 9.5 | 76.3 |
| | Agitate | 9.5 | 76.5 |
| | 4 deg, 10 day | 9.5 | 76.6 |
| | 37 deg, 10 day | 9.5 | 73.7 |
| | 4 deg, 1 month | 9.5 | 76.5 |
| Glyco_6 | Initial purification | 6.3 | 81.7 |
| | 4 deg, 0 day | 12 | 80.6 |
| | Agitate | 12 | 81.2 |
| | 4 deg, 10 day | 12 | 81.0 |
| | 37 deg, 10 day | 12 | 77.3 |
| | 4 deg, 1 month | 12 | 80.8 |

### B) SDS PAGE Analysis

[0440] The TFcs were run on a 4-12% SDS-PAGE gel in denaturing conditions and visualized by Coomassie stain. The results are shown in FIG. 13A (non-reduced) and FIG. 13B (reduced).

### C) Thermal Stability Measurement by DSF

[0441] The temperature at which a TFcA or TFc unfolds is determined by Differential Scanning Fluorimetry (DSF) essentially as follows. The DSF assay is performed in the IQ5 Real Time Detection System (Bio-Rad). 20 μl solutions of 15 uM TFcA or TFc, 1× Sypro® Orange (Invitrogen Life Technologies), and 1×PBS are added to the wells of a 96 well plate. The plate is heated from 20° C. to 90° C. with a heating rate of 1° C./min. Data is transferred to GraphPad Prism® for analysis. Exemplary results from thermal stability determination by DSF for glycosylation site mutants are shown in Table 25.

TABLE 25
DSF of Tandem Fcs

| protein | Tm |
|---|---|
| glyco_wt | 60.5 |
| glyco_1 | 55.5 |
| glyco_2 | 57.9 |
| glyco_3 | 57.9 |
| glyco_4 | 57.3 |
| glyco_5 | 56.3 |
| glyco_6 | 51.5 |

### Example 8

### DSF Analysis of Backbone Variants

### Thermal Stability Measurement by DSF

[0442] The temperature at which a TFcA or TFc unfolds is determined by Differential Scanning Fluorimetry (DSF) as described above. Results are shown in Table 26 below. These data show that backbone modifications such as the addition of a disulfide bridge and glycosylation mutations can improve thermal stability.

TABLE 26
DSF of Tandem Fcs with backbone variations

| Protein | Tm |
|---|---|
| Onartuzumab | 57.1 |
| Onartuzumab-23 | 46.9 |
| Onartuzumab-39 | 51.2 |
| Onartuzumab-23E | 57.8 |
| Onartuzumab-39Egy4 | 60.3 |
| Onartuzumab-39Egy4-cetuximab | 57.3 |
| Onartuzumab-39Egy4-panitumumab | n/a |
| Onartuzumab-39Egy4-2224 | 55.7 |

### Example 9

### Production and Analysis of Monovalent and Bispecific tFc Molecules Using Onartuzumab Binding Site

### Percent Monomer Determination Using Size Exclusion Chromatography

[0443] 50 μg of sample is injected on a TSKgel SuperSW3000 column (4.6 mm ID×30 cm) using 20 mM sodium phosphate (+300 mM NaCl) as running buffer. All measurements are performed on Agilent 1100 HPLC which is equipped with an auto sampler, a binary pump and a diode array detector. Percent monomers are determined by analyzing the data in Chemstation software. Typically, all the samples are only protein A purified and at a concentration of 5 mg/mL in 1×PBS.

TABLE 27
SEC Stability of MM131 molecules at 4° C.

| | Percent | Percent |
|---|---|---|
| | monomers | monomers |
| Molecule name | (Day 0) | (Day 7) |
| Onartuzumab-23 | 72 | 76 |
| Onartuzumab-39 | 70 | 76 |
| Onartuzumab-23E | 89 | 89 |
| Onartuzumab-39EGY4 | 81 | 81 |
| Onartuzumab-39EGY4-2224 | 88 | 88 |
| Onartuzumab-39EGY4-panitumumab | 85 | 85 |
| Onartuzumab-39EGY4-cetuximab | 82 | 83 |

### Fortebio Binding Protocol

### Materials Required:

[0444] 96-well, black, round, flat bottom, polypropylene microplates (Greiner Bio-one #655209).

Octet instrument and software (version 3.0).
Protein A sensor tips (Fortebio, #18-5010)
1×PBS, antigen (his tagged cMET), antibodies

### Protocol:

[0445] All reagents are equilibrated and samples are brought to room temperature. Protein A sensor tips (Fortebio®, #18-5010) are hydrated for 10 min in 1×PBS. Kinetic assays are run using the Octet® software and procedure per manufacturer's instruction. Assay steps typically include: 1-2 min of equilibration in 1×PBS, 4 min of antibody loading (conc: 50 μg/mL in 1×PBS), 1-2 min of baseline stabilization, 4 min of antibody:antigen association, and 4 min of antibody:antigen dissociation. 1×PBS is used as the matrix throughout. Data are analyzed with Octet® Data Analysis software, processed, and fit to the curve using 1:1 binding model to determine kinetic parameters (K_{d}, Kₒₙ and K_{off})

TABLE 28
K_{d} of anti-cMet TFcs with various backbone modifications

| | Kd determined by Fortebio ® |
|---|---|
| Molecule or antibody name | (Binding to cMET.his) |
| Onartuzumab-23E | 1.3 nM |
| Onartuzumab-39EGY4 | 1.25 nM |
| Onartuzumab-23 | 1.24 nM |
| Onartuzumab-39 | 1.26 nM |
| Onartuzumab-39EGY4-224 | 1.29 nM |
| Onartuzumab-39EGY4-cetuximab | 0.9 nM |
| Onartuzumab-39EGY4-panitumumab | 1.6 nM |
| Onartuzumab | 1.2 nM |

### Example 10

### Signaling Inhibition by Onartuzumab and Bispecific Variants

[0446] To test the ability of the constructs in Table 28 to inhibit pMet, the TFc variants were tested in HGF-induced SW620 cells (ATCC® cat #: CCL-227™) as follows: On day 1, actively mid-log (about 80% confluence) growing cells (e.g., SW620 cells) are split in RPMI (+10% FBS+L/glutamine (2 mM)+Pen/Strep) media. Approximately 20,000 cells are seeded/well in a 96-well plate. On day 2, the media is changed from 10% FBS to serum-free media—RPMI+0.5% FBS (+L/glutamine+Pen/Strep) media. On day 3, the HGF (stimulated control) and various inhibitors/antibodies are diluted into the appropriate volume of serum free media. 100 μL of each inhibitor per concentration is added/well. The inhibitor is allowed to incubate at 37° C. for 2 hours. The cells are then washed 2× with cold PBS and later lysed in 50 μL/well of MPER (cat #PI78505, VWR International)+150 mM NaCl+Protease and Phosphatase Inhibitor buffer (cOmplete™ Protease Inhibitor Cocktail Tablet provided in EASY packs, cat #4693124001, Roche Diagnostics Corp; PhosSTOP® Phosphatase Inhibitor Cocktail Tablets, cat #4906837001, Roche Diagnostics Corp). The lysates are placed in −80° C. usually within 5 minutes after lysis.

[0447] For measurement of pMet signal, an ELISA kit was used (Human Phospho-HGF R/c-MET DuoSet IC Economy Pack, cat #DYC2480E, R&D Systems). A 384-well High Binding Black Solid plate from Corning® is coated with capture anti-MET antibody from R&D Systems at a final concentration of 4 μg/mL/well in PBS buffer. The plates are left at overnight at room temperature. On day 4, the −80° C. lysate is thawed at room temperature. Plates are then washed 3 times with 50 μl/well in the BIOTEK plate washer with PBST (PBS with 0.05% Tween-20®). The 384-well plates are blocked with 50 μL/well 2% BSA/PBS for 1 hour at room temperature. Duplicate lysates are pooled into one well and diluted 2-fold in 2% BSA/0.1% Tween-20/25% MPER/PBS. Recombinant standard curves are prepared by making 10×2-fold serial dilutions in 2% BSA/0.1% Tween-20®/25% MPER/PBS. ELISA plates are washed with 0.05% Tween-20/PBS. 20 μL lysates are transferred from the 96-well plate in quadruplicate to the 384-well plate. Plates are incubated at room temperature for 2 hours and washed 3 times with 0.05% Tween-20/PBS. 20 μL primary detection anti-phosphotyrosine antibody, 4G10 (cat#05-321, Millipore/Upstate), is added at a dilution of 1:1000 to the ELISA plates and incubated for 1 hour at room temperature. 20 μL of SuperSignal® ELISA Pico Chemiluminescent Substrate (cat #PI37069, VWR International) is added per manufacturer's directions and read on Envision® Plate Reader (Perkin Elmer). For data analyses, duplicate samples are averaged and error bars are used to represent the standard deviation between the two replicates Inhibition curves and corresponding IC50 values are calculated using GraphPad Prism® software (GraphPad Software, Inc.) via regression of the data to a 4 parameter logistic equation.

[0448] As shown in FIG. 16, all molecules tested inhibited pMet signaling in a similar manner, without regard to the identity of the TFc core region. The bivalent onartuzumab_{—}39Egy4_{—}2224, onartuzumab_{—}39Egy4_panitumumab, and onartuzumab_{—}39Egy4_cetuximab variants inhibited to a similar extent as did the monovalent onartuzumab_{—}39Egy4 variant.

### EQUIVALENTS

[0449] Those skilled in the art will recognize, or be able to ascertain and implement using no more than routine experimentation, many equivalents of the specific embodiments described herein. Such equivalents are intended to be encompassed by the following claims. Any combinations of the embodiments disclosed in the dependent claims are contemplated to be within the scope of the disclosure.

### INCORPORATION BY REFERENCE

[0450] The disclosure of each and every U.S. and foreign patent and pending patent application and publication referred to herein is specifically incorporated by reference herein in its entirety.

The application's sequence listing, which the Patent Office published only in electronic form, follows.

SEQUENCE LISTING (413 sequences)

SEQ ID NO: 1 - protein, 10 aa, Homo sapiens
EPKSCDKTHT

SEQ ID NO: 2 - protein, 5 aa, Homo sapiens
CPPCP

SEQ ID NO: 3 - protein, 6 aa, Homo sapiens
APELLG

SEQ ID NO: 4 - protein, 21 aa, Homo sapiens
EPKSCDKTHTCPPCPAPELLG

SEQ ID NO: 5 - protein, 7 aa, Homo sapiens
ERKCCVE

SEQ ID NO: 6 - protein, 7 aa, Homo sapiens
APPVAGP

SEQ ID NO: 7 - protein, 19 aa, Homo sapiens
ERKCCVECPPCPAPPVAGP

SEQ ID NO: 8 - protein, 12 aa, Homo sapiens
ELKTPLGDTTHT

SEQ ID NO: 9 - protein, 50 aa, Homo sapiens
CPRCPEPKSCDTPPPCPRCPEPKSCDTPPPCPRCPEPKSCDTPPPCPRCP

SEQ ID NO: 10 - protein, 6 aa, Homo sapiens
APELLG

SEQ ID NO: 11 - protein, 68 aa, Homo sapiens
ELKTPLGDTTHTCPRCPEPKSCDTPPPCPRCPEPKSCDTPPPCPRCPEPKSCDTPPPCPRCPAPELLG

SEQ ID NO: 12 - protein, 7 aa, Homo sapiens
ESKYGPP

SEQ ID NO: 13 - protein, 5 aa, Homo sapiens
CPSCP

SEQ ID NO: 14 - protein, 6 aa, Homo sapiens
APEFLG

SEQ ID NO: 15 - protein, 18 aa, Homo sapiens
ESKYGPPCPSCPAPEFLG

SEQ ID NO: 16 - protein, 10 aa, Artificial Sequence
  source: /note="Description of Artificial Sequence: Synthetic peptide"
EPKSCDKTCC

SEQ ID NO: 17 - protein, 10 aa, Artificial Sequence
  source: /note="Description of Artificial Sequence: Synthetic peptide"
EPKSCDKCHT

SEQ ID NO: 18 - protein, 21 aa, Artificial Sequence
  source: /note="Description of Artificial Sequence: Synthetic peptide"
EPKSCDKTCCCPPCPAPELLG

SEQ ID NO: 19 - protein, 21 aa, Artificial Sequence [sequence omitted]

SEQ ID NO: 20 - protein, 21 aa, Homo sapiens [sequence omitted]

SEQ ID NO: 21 - protein, 21 aa, Artificial Sequence
  source: /note="Description of Artificial Sequence: Synthetic peptide"
EPKSCDKTCCCPSCPAPEFLG

SEQ ID NO: 22 - protein, 21 aa, Artificial Sequence
  source: /note="Description of Artificial Sequence: Synthetic peptide"
EPKSCDKCHTCPSCPAPEFLG

SEQ ID NO: 23 - protein, 11 aa, Homo sapiens
CPPCPAPELLG

SEQ ID NO: 24 - protein, 11 aa, Homo sapiens
CPSCPAPEFLG

SEQ ID NO: 25 - protein, 104 aa, Artificial Sequence
  source: /note="Description of Artificial Sequence: Synthetic polypeptide"
GPSVFLFPPKPKDTLMISRTPEVTCVVVDVSHEDPEVKFNWYVDGVEVHNAKTKPREEQYQSTYRVVSVLTVLHQDWLNGKEYKCKVSNKALPAPIEKTISKAK

SEQ ID NO: 26 - protein, 104 aa, Artificial Sequence
  source: /note="Description of Artificial Sequence: Synthetic polypeptide"
GPSVFLFPPKPKDTLMISRTPEVTCVVVDVSQEDPEVQFNWYVDGVEVHNAKTKPREEQFNSKYRVVSVLTVLHQDWLNGKEYKCKVSNKGLPSSIEKTISKAK

SEQ ID NO: 27 - protein, 107 aa, Artificial Sequence
  source: /note="Description of Artificial Sequence: Synthetic polypeptide"
GQPREPQVYTLPPSRDELTKNQVSLTCLVKGFYPSDIAVEWESNGQPENNYKTTPPVLDSDGSFFLYSKLTVDKSRWQQGNVFSCSVMHEALHNHYTQKSLSLSPGK

SEQ ID NO: 28 - protein, 106 aa, Artificial Sequence [sequence omitted]

SEQ ID NO: 29 - protein, 107 aa, Artificial Sequence
  source: /note="Description of Artificial Sequence: Synthetic polypeptide"
GQPREPQVYTLPPSREEMTKNQVSLTCLVKGFYPSDIAVEWESNGQPENNYKTTPPVLDSDGSFFLYSKLTVDKSRWQQGNVFSCSVMHEALHNHYTQKSLSLSPGK

SEQ ID NO: 30 - protein, 106 aa, Artificial Sequence
  source: /note="Description of Artificial Sequence: Synthetic polypeptide"
GQPREPQVYTLPPSREEMTKNQVSLTCLVKGFYPSDIAVEWESNGQPENNYKTTPPVLDSDGSFFLYSKLTVDKSRWQQGNVFSCSVMHEALHNHYTQKSLSLSPG

SEQ ID NO: 31 - protein, 107 aa, Artificial Sequence
  source: /note="Description of Artificial Sequence: Synthetic polypeptide"
GQPREPQVYTLPPSRDELTKNQVSLSCAVKGFYPSDIAVEWESNGQPENNYKTTPPVLDSDGSFFLVSKLTVDKSRWQQGNVFSCSVMHEALHNHYTQKSLSLSPGK

SEQ ID NO: 32 - protein, 106 aa, Artificial Sequence
  source: /note="Description of Artificial Sequence: Synthetic polypeptide"
GQPREPQVYTLPPSRDELTKNQVSLSCAVKGFYPSDIAVEWESNGQPENNYKTTPPVLDSDGSFFLVSKLTVDKSRWQQGNVFSCSVMHEALHNHYTQKSLSLSPG

SEQ ID NO: 33 - protein, 107 aa, Artificial Sequence
  source: /note="Description of Artificial Sequence: Synthetic polypeptide"
GQPREPQVYTLPPSREEMTKNQVSLSCAVKGFYPSDIAVEWESNGQPENNYKTTPPVLDSDGSFFLVSKLTVDKSRWQQGNVFSCSVMHEALHNHYTQKSLSLSPGK

SEQ ID NO: 34 - protein, 106 aa, Artificial Sequence
  source: /note="Description of Artificial Sequence: Synthetic polypeptide"
GQPREPQVYTLPPSREEMTKNQVSLSCAVKGFYPSDIAVEWESNGQPENNYKTTPPVLDSDGSFFLVSKLTVDKSRWQQGNVFSCSVMHEALHNHYTQKSLSLSPG

SEQ ID NO: 35 - protein, 107 aa, Artificial Sequence
  source: /note="Description of Artificial Sequence: Synthetic polypeptide"
GQPREPQVYTLPPSRDELTKNQVSLWCLVKGFYPSDIAVEWESNGQPENNYKTTPPVLDSDGSFFLYSKLTVDKSRWQQGNVFSCSVMHEALHNHYTQKSLSLSPGK

SEQ ID NO: 36 - protein, 106 aa, Artificial Sequence
  source: /note="Description of Artificial Sequence: Synthetic polypeptide"
GQPREPQVYTLPPSRDELTKNQVSLWCLVKGFYPSDIAVEWESNGQPENNYKTTPPVLDSDGSFFLYSKLTVDKSRWQQGNVFSCSVMHEALHNHYTQKSLSLSPG

SEQ ID NO: 37 - protein, 107 aa, Artificial Sequence
  source: /note="Description of Artificial Sequence: Synthetic polypeptide"
GQPREPQVYTLPPSREEMTKNQVSLWCLVKGFYPSDIAVEWESNGQPENNYKTTPPVLDSDGSFFLYSKLTVDKSRWQQGNVFSCSVMHEALHNHYTQKSLSLSPGK

SEQ ID NO: 38 - protein, 106 aa, Artificial Sequence
  source: /note="Description of Artificial Sequence: Synthetic polypeptide"
GQPREPQVYTLPPSREEMTKNQVSLWCLVKGFYPSDIAVEWESNGQPENNYKTTPPVLDSDGSFFLYSKLTVDKSRWQQGNVFSCSVMHEALHNHYTQKSLSLSPG

SEQ ID NO: 39 - protein, 107 aa, Artificial Sequence
  source: /note="Description of Artificial Sequence: Synthetic polypeptide"
GQPREPQVYTLPPSRDELTKNQVSLTCLVKGFYPSDIAVEWESNGQPENNYKTTPPVLDSDGSFFLTSKLTVDKSRWQQGNVFSCSVMHEALHNHYTQKSLSLSPGK

SEQ ID NO: 40 - protein, 106 aa, Artificial Sequence
  source: /note="Description of Artificial Sequence: Synthetic polypeptide"
GQPREPQVYTLPPSRDELTKNQVSLTCLVKGFYPSDIAVEWESNGQPENNYKTTPPVLDSDGSFFLTSKLTVDKSRWQQGNVFSCSVMHEALHNHYTQKSLSLSPG

SEQ ID NO: 41 - protein, 107 aa, Artificial Sequence
  source: /note="Description of Artificial Sequence: Synthetic polypeptide"
GQPREPQVYTLPPSREEMTKNQVSLTCLVKGFYPSDIAVEWESNGQPENNYKTTPPVLDSDGSFFLTSKLTVDKSRWQQGNVFSCSVMHEALHNHYTQKSLSLSPGK

SEQ ID NO: 42 - protein, 106 aa, Artificial Sequence
  source: /note="Description of Artificial Sequence: Synthetic polypeptide"
GQPREPQVYTLPPSREEMTKNQVSLTCLVKGFYPSDIAVEWESNGQPENNYKTTPPVLDSDGSFFLTSKLTVDKSRWQQGNVFSCSVMHEALHNHYTQKSLSLSPG

SEQ ID NO: 43 - protein, 107 aa, Artificial Sequence
  source: /note="Description of Artificial Sequence: Synthetic polypeptide"
GQPREPQVYTLPPSRDELTKNQVSLYCLVKGFYPSDIAVEWESNGQPENNYKTTPPVLDSDGSFFLYSKLTVDKSRWQQGNVFSCSVMHEALHNHYTQKSLSLSPGK

SEQ ID NO: 44 - protein, 106 aa, Artificial Sequence
  source: /note="Description of Artificial Sequence: Synthetic polypeptide"
GQPREPQVYTLPPSRDELTKNQVSLYCLVKGFYPSDIAVEWESNGQPENNYKTTPPVLDSDGSFFLYSKLTVDKSRWQQGNVFSCSVMHEALHNHYTQKSLSLSPG

SEQ ID NO: 45 - protein, 107 aa, Artificial Sequence
  source: /note="Description of Artificial Sequence: Synthetic polypeptide"
GQPREPQVYTLPPSREEMTKNQVSLYCLVKGFYPSDIAVEWESNGQPENNYKTTPPVLDSDGSFFLYSKLTVDKSRWQQGNVFSCSVMHEALHNHYTQKSLSLSPGK

SEQ ID NO: 46 - protein, 106 aa, Artificial Sequence
  source: /note="Description of Artificial Sequence: Synthetic polypeptide"
GQPREPQVYTLPPSREEMTKNQVSLYCLVKGFYPSDIAVEWESNGQPENNYKTTPPVLDSDGSFFLYSKLTVDKSRWQQGNVFSCSVMHEALHNHYTQKSLSLSPG

SEQ ID NO: 47 - protein, 107 aa, Artificial Sequence
  source: /note="Description of Artificial Sequence: Synthetic polypeptide"
GQPREPQVYTLPPSRDELTKNQVHLTCLVKGFYPSDIAVEWESNGQPENNYKTTPPVLDSDGSFALYSKLTVDKSRWQQGNVFSCSVMHEALHNHYTQKSLSLSPGK

SEQ ID NO: 48 - protein, 106 aa, Artificial Sequence
  source: /note="Description of Artificial Sequence: Synthetic polypeptide"
GQPREPQVYTLPPSRDELTKNQVHLTCLVKGFYPSDIAVEWESNGQPENNYKTTPPVLDSDGSFALYSKLTVDKSRWQQGNVFSCSVMHEALHNHYTQKSLSLSPG

SEQ ID NO: 49 - protein, 107 aa, Artificial Sequence
  source: /note="Description of Artificial Sequence: Synthetic polypeptide"
GQPREPQVYTLPPSREEMTKNQVHLTCLVKGFYPSDIAVEWESNGQPENNYKTTPPVLDSDGSFALYSKLTVDKSRWQQGNVFSCSVMHEALHNHYTQKSLSLSPGK

SEQ ID NO: 50 - protein, 106 aa, Artificial Sequence
  source: /note="Description of Artificial Sequence: Synthetic polypeptide"
GQPREPQVYTLPPSREEMTKNQVHLTCLVKGFYPSDIAVEWESNGQPENNYKTTPPVLDSDGSFALYSKLTVDKSRWQQGNVFSCSVMHEALHNHYTQKSLSLSPG

SEQ ID NO: 51 - protein, 107 aa, Artificial Sequence
  source: /note="Description of Artificial Sequence: Synthetic polypeptide"
GQPREPQVTTLPPSRDELTKNQVSLTCLVKGFYPSDIAVEWESNGQPENNYKTFPPVLDSDGSFFLYSKLTVDKSRWQQGNVFSCSVMHEALHNHYTQKSLSLSPGK

SEQ ID NO: 52 - protein, 106 aa, Artificial Sequence
  source: /note="Description of Artificial Sequence: Synthetic polypeptide"
GQPREPQVTTLPPSRDELTKNQVSLTCLVKGFYPSDIAVEWESNGQPENNYKTFPPVLDSDGSFFLYSKLTVDKSRWQQGNVFSCSVMHEALHNHYTQKSLSLSPG

SEQ ID NO: 53 - protein, 107 aa, Artificial Sequence
  source: /note="Description of Artificial Sequence: Synthetic polypeptide"
GQPREPQVTTLPPSREEMTKNQVSLTCLVKGFYPSDIAVEWESNGQPENNYKTFPPVLDSDGSFFLYSKLTVDKSRWQQGNVFSCSVMHEALHNHYTQKSLSLSPGK

SEQ ID NO: 54 - protein, 106 aa, Artificial Sequence
  source: /note="Description of Artificial Sequence: Synthetic polypeptide"
GQPREPQVTTLPPSREEMTKNQVSLTCLVKGFYPSDIAVEWESNGQPENNYKTFPPVLDSDGSFFLYSKLTVDKSRWQQGNVFSCSVMHEALHNHYTQKSLSLSPG

SEQ ID NO: 55 - protein, 107 aa, Artificial Sequence
  source: /note="Description of Artificial Sequence: Synthetic polypeptide"
GQPREPQVYTLPPSRDELTKNQVSLTCLVDGFYPSDIAVEWESNGQPENNYDTTPPVLDSDGSFFLYSDLTVDKSRWQQGNVFSCSVMHEALHNHYTQKSLSLSPGK

SEQ ID NO: 56 - protein, 106 aa, Artificial Sequence
  source: /note="Description of Artificial Sequence: Synthetic polypeptide"
GQPREPQVYTLPPSRDELTKNQVSLTCLVDGFYPSDIAVEWESNGQPENNYDTTPPVLDSDGSFFLYSDLTVDKSRWQQGNVFSCSVMHEALHNHYTQKSLSLSPG

SEQ ID NO: 57 - protein, 107 aa, Artificial Sequence
  source: /note="Description of Artificial Sequence: Synthetic polypeptide"
GQPREPQVYTLPPSREEMTKNQVSLTCLVDGFYPSDIAVEWESNGQPENNYDTTPPVLDSDGSFFLYSDLTVDKSRWQQGNVFSCSVMHEALHNHYTQKSLSLSPGK

SEQ ID NO: 58 - protein, 106 aa, Artificial Sequence
  source: /note="Description of Artificial Sequence: Synthetic polypeptide"
GQPREPQVYTLPPSREEMTKNQVSLTCLVDGFYPSDIAVEWESNGQPENNYDTTPPVLDSDGSFFLYSDLTVDKSRWQQGNVFSCSVMHEALHNHYTQKSLSLSPG

SEQ ID NO: 59 - protein, 107 aa, Artificial Sequence
  source: /note="Description of Artificial Sequence: Synthetic polypeptide"
GQPREPQVYTLPPSRKKLTKNQVSLTCLVKGFYPSDIAVEWESNGQPENNYKTTPPVLKSDGSFFLYSKLTVDKSRWQQGNVFSCSVMHEALHNHYTQKSLSLSPGK

SEQ ID NO: 60 - protein, 106 aa, Artificial Sequence
  source: /note="Description of Artificial Sequence: Synthetic polypeptide"
GQPREPQVYTLPPSRKKLTKNQVSLTCLVKGFYPSDIAVEWESNGQPENNYKTTPPVLKSDGSFFLYSKLTVDKSRWQQGNVFSCSVMHEALHNHYTQKSLSLSPG

SEQ ID NO: 61 - protein, 107 aa, Artificial Sequence
  source: /note="Description of Artificial Sequence: Synthetic polypeptide"
GQPREPQVYTLPPSRKKMTKNQVSLTCLVKGFYPSDIAVEWESNGQPENNYKTTPPVLKSDGSFFLYSKLTVDKSRWQQGNVFSCSVMHEALHNHYTQKSLSLSPGK

SEQ ID NO: 62 - protein, 106 aa, Artificial Sequence
  source: /note="Description of Artificial Sequence: Synthetic polypeptide"
GQPREPQVYTLPPSRKKMTKNQVSLTCLVKGFYPSDIAVEWESNGQPENNYKTTPPVLKSDGSFFLYSKLTVDKSRWQQGNVFSCSVMHEALHNHYTQKSLSLSPG

SEQ ID NO: 63 - protein, 107 aa, Artificial Sequence
  source: /note="Description of Artificial Sequence: Synthetic polypeptide"
GQPREPQVCTLPPSRDELTKNQVSLTCLVKGFYPSDIAVEWESNGQPENNYKTTPPVLDSDGSFFLYSKLTVDKSRWQQGNVFSCSVMHEALHNHYTQKSLSLSPGK

SEQ ID NO: 64 - protein, 106 aa, Artificial Sequence
  source: /note="Description of Artificial Sequence: Synthetic polypeptide"
GQPREPQVCTLPPSRDELTKNQVSLTCLVKGFYPSDIAVEWESNGQPENNYKTTPPVLDSDGSFFLYSKLTVDKSRWQQGNVFSCSVMHEALHNHYTQKSLSLSPG

SEQ ID NO: 65 - protein, 107 aa, Artificial Sequence
  source: /note="Description of Artificial Sequence: Synthetic polypeptide"
GQPREPQVCTLPPSREEMTKNQVSLTCLVKGFYPSDIAVEWESNGQPENNYKTTPPVLDSDGSFFLYSKLTVDKSRWQQGNVFSCSVMHEALHNHYTQKSLSLSPGK

SEQ ID NO: 66 - protein, 106 aa, Artificial Sequence
  source: /note="Description of Artificial Sequence: Synthetic polypeptide"
GQPREPQVCTLPPSREEMTKNQVSLTCLVKGFYPSDIAVEWESNGQPENNYKTTPPVLDSDGSFFLYSKLTVDKSRWQQGNVFSCSVMHEALHNHYTQKSLSLSPG

SEQ ID NO: 67 - protein, 107 aa, Artificial Sequence
  source: /note="Description of Artificial Sequence: Synthetic polypeptide"
GQPREPQVYTLPPCRDELTKNQVSLTCLVKGFYPSDIAVEWESNGQPENNYKTTPPVLDSDGSFFLYSKLTVDKSRWQQGNVFSCSVMHEALHNHYTQKSLSLSPGK

SEQ ID NO: 68 - protein, 106 aa, Artificial Sequence
  source: /note="Description of Artificial Sequence: Synthetic polypeptide"
GQPREPQVYTLPPCRDELTKNQVSLTCLVKGFYPSDIAVEWESNGQPENNYKTTPPVLDSDGSFFLYSKLTVDKSRWQQGNVFSCSVMHEALHNHYTQKSLSLSPG

SEQ ID NO: 69 - protein, 107 aa, Artificial Sequence
  source: /note="Description of Artificial Sequence: Synthetic polypeptide"
GQPREPQVYTLPPCREEMTKNQVSLTCLVKGFYPSDIAVEWESNGQPENNYKTTPPVLDSDGSFFLYSKLTVDKSRWQQGNVFSCSVMHEALHNHYTQKSLSLSPGK

SEQ ID NO: 70 - protein, 106 aa, Artificial Sequence
  source: /note="Description of Artificial Sequence: Synthetic polypeptide"
GQPREPQVYTLPPCREEMTKNQVSLTCLVKGFYPSDIAVEWESNGQPENNYKTTPPVLDSDGSFFLYSKLTVDKSRWQQGNVFSCSVMHEALHNHYTQKSLSLSPG

SEQ ID NO: 71 - protein, 110 aa, Artificial Sequence
  source: /note="Description of Artificial Sequence: Synthetic polypeptide"
GQPREPQVYTLPPSRDELTKNQVSLTCLVKGFYPSDIAVEWESNGQPENNYKTTPPVLDSDGSFFLYSKLTVDKSRWQQGNVFSCSVMHEALHNHYTQKSLSLSKSCDKT

SEQ ID NO: 72 - protein, 110 aa, Artificial Sequence
  source: /note="Description of Artificial Sequence: Synthetic polypeptide"
GQPREPQVYTLPPSREEMTKNQVSLTCLVKGFYPSDIAVEWESNGQPENNYKTTPPVLDSDGSFFLYSKLTVDKSRWQQGNVFSCSVMHEALHNHYTQKSLSLSKSCDKT

SEQ ID NO: 73 - protein, 107 aa, Artificial Sequence
  source: /note="Description of Artificial Sequence: Synthetic polypeptide"
GQPREPQVYTLPPSRDELTKNQVSLTCLVKGFYPSDIAVEWESNGQPENNYKTTPPVLDSDGSFFLYSKLTVDKSRWQQGNVFSCSVMHEALHNHYTQKSLSLSGEC

SEQ ID NO: 74 - protein, 107 aa, Artificial Sequence
  source: /note="Description of Artificial Sequence: Synthetic polypeptide"
GQPREPQVYTLPPSREEMTKNQVSLTCLVKGFYPSDIAVEWESNGQPENNYKTTPPVLDSDGSFFLYSKLTVDKSRWQQGNVFSCSVMHEALHNHYTQKSLSLSGEC

SEQ ID NO: 75 - protein, 107 aa, Artificial Sequence
  source: /note="Description of Artificial Sequence: Synthetic polypeptide"
GQPREPQVCTLPPSRDELTKNQVSLSCAVKGFYPSDIAVEWESNGQPENNYKTTPPVLDSDGSFFLVSKLTVDKSRWQQGNVFSCSVMHEALHNHYTQKSLSLSPGK

SEQ ID NO: 76 - protein, 106 aa, Artificial Sequence
  source: /note="Description of Artificial Sequence: Synthetic polypeptide"
GQPREPQVCTLPPSRDELTKNQVSLSCAVKGFYPSDIAVEWESNGQPENNYKTTPPVLDSDGSFFLVSKLTVDKSRWQQGNVFSCSVMHEALHNHYTQKSLSLSPG

SEQ ID NO: 77 - protein, 107 aa, Artificial Sequence
  source: /note="Description of Artificial Sequence: Synthetic polypeptide"
GQPREPQVCTLPPSREEMTKNQVSLSCAVKGFYPSDIAVEWESNGQPENNYKTTPPVLDSDGSFFLVSKLTVDKSRWQQGNVFSCSVMHEALHNHYTQKSLSLSPGK

SEQ ID NO: 78 - protein, 106 aa, Artificial Sequence
  source: /note="Description of Artificial Sequence: Synthetic polypeptide"
GQPREPQVCTLPPSREEMTKNQVSLSCAVKGFYPSDIAVEWESNGQPENNYKTTPPVLDSDGSFFLVSKLTVDKSRWQQGNVFSCSVMHEALHNHYTQKSLSLSPG

SEQ ID NO: 79 - protein, 107 aa, Artificial Sequence
  source: /note="Description of Artificial Sequence: Synthetic polypeptide"
GQPREPQVYTLPPCRDELTKNQVSLWCLVKGFYPSDIAVEWESNGQPENNYKTTPPVLDSDGSFFLYSKLTVDKSRWQQGNVFSCSVMHEALHNHYTQKSLSLSPGK

SEQ ID NO: 80 - protein, 106 aa, Artificial Sequence
  source: /note="Description of Artificial Sequence: Synthetic polypeptide"
GQPREPQVYTLPPCRDELTKNQVSLWCLVKGFYPSDIAVEWESNGQPENNYKTTPPVLDSDGSFFLYSKLTVDKSRWQQGNVFSCSVMHEALHNHYTQKSLSLSPG

SEQ ID NO: 81 - protein, 107 aa, Artificial Sequence
  source: /note="Description of Artificial Sequence: Synthetic polypeptide"
GQPREPQVYTLPPCREEMTKNQVSLWCLVKGFYPSDIAVEWESNGQPENNYKTTPPVLDSDGSFFLYSKLTVDKSRWQQGNVFSCSVMHEALHNHYTQKSLSLSPGK

SEQ ID NO: 82 - protein, 106 aa, Artificial Sequence
  source: /note="Description of Artificial Sequence: Synthetic polypeptide"
GQPREPQVYTLPPCREEMTKNQVSLWCLVKGFYPSDIAVEWESNGQPENNYKTTPPVLDSDGSFFLYSKLTVDKSRWQQGNVFSCSVMHEALHNHYTQKSLSLSPG

SEQ ID NO: 83 - protein, 110 aa, Artificial Sequence
  source: /note="Description of Artificial Sequence: Synthetic polypeptide"
GQPREPQVYTLPPSRDELTKNQVSLSCAVKGFYPSDIAVEWESNGQPENNYKTTPPVLDSDGSFFLVSKLTVDKSRWQQGNVFSCSVMHEALHNHYTQKSLSLSKSCDKT

SEQ ID NO: 84 - protein, 110 aa, Artificial Sequence
  source: /note="Description of Artificial Sequence: Synthetic polypeptide"
GQPREPQVYTLPPSREEMTKNQVSLSCAVKGFYPSDIAVEWESNGQPENNYKTTPPVLDSDGSFFLVSKLTVDKSRWQQGNVFSCSVMHEALHNHYTQKSLSLSKSCDKT

SEQ ID NO: 85 - protein, 107 aa, Artificial Sequence
  source: /note="Description of Artificial Sequence: Synthetic polypeptide"
GQPREPQVYTLPPSRDELTKNQVSLWCLVKGFYPSDIAVEWESNGQPENNYKTTPPVLDSDGSFFLYSKLTVDKSRWQQGNVFSCSVMHEALHNHYTQKSLSLSGEC

SEQ ID NO: 86 - protein, 107 aa, Artificial Sequence
  source: /note="Description of Artificial Sequence: Synthetic polypeptide"
GQPREPQVYTLPPSREEMTKNQVSLWCLVKGFYPSDIAVEWESNGQPENNYKTTPPVLDSDGSFFLYSKLTVDKSRWQQGNVFSCSVMHEALHNHYTQKSLSLSGEC

SEQ ID NO: 87 - protein, 107 aa, Artificial Sequence
  source: /note="Description of Artificial Sequence: Synthetic polypeptide"
GQPREPQVYTLPPSRDELTKNQVSLSCAVKGFYPSDIAVEWESNGQPENNYKTTPPVLDSDGSFFLVSKLTVDKSRWQQGNVFSCSVMHEALHNHYTQKSLSLSGEC

SEQ ID NO: 88 - protein, 107 aa, Artificial Sequence
  source: /note="Description of Artificial Sequence: Synthetic polypeptide"
GQPREPQVYTLPPSREEMTKNQVSLSCAVKGFYPSDIAVEWESNGQPENNYKTTPPVLDSDGSFFLVSKLTVDKSRWQQGNVFSCSVMHEALHNHYTQKSLSLSGEC

SEQ ID NO: 89 - protein, 110 aa, Artificial Sequence
  source: /note="Description of Artificial Sequence: Synthetic polypeptide"
GQPREPQVYTLPPSRDELTKNQVSLWCLVKGFYPSDIAVEWESNGQPENNYKTTPPVLDSDGSFFLYSKLTVDKSRWQQGNVFSCSVMHEALHNHYTQKSLSLSKSCDKT

SEQ ID NO: 90 - protein, 110 aa, Artificial Sequence
  source: /note="Description of Artificial Sequence: Synthetic polypeptide"
GQPREPQVYTLPPSREEMTKNQVSLWCLVKGFYPSDIAVEWESNGQPENNYKTTPPVLDSDGSFFLYSKLTVDKSRWQQGNVFSCSVMHEALHNHYTQKSLSLSKSCDKT

SEQ ID NO: 91 - protein, 110 aa, Artificial Sequence
  source: /note="Description of Artificial Sequence: Synthetic polypeptide"
GQPREPQVYTLPPSRDELTKNQVHLTCLVKGFYPSDIAVEWESNGQPENNYKTTPPVLDSDGSFALYSKLTVDKSRWQQGNVFSCSVMHEALHNHYTQKSLSLSKSCDKT

SEQ ID NO: 92 - protein, 110 aa, Artificial Sequence
  source: /note="Description of Artificial Sequence: Synthetic polypeptide"
GQPREPQVYTLPPSREEMTKNQVHLTCLVKGFYPSDIAVEWESNGQPENNYKTTPPVLDSDGSFALYSKLTVDKSRWQQGNVFSCSVMHEALHNHYTQKSLSLSKSCDKT

SEQ ID NO: 93 - protein, 107 aa, Artificial Sequence
  source: /note="Description of Artificial Sequence: Synthetic polypeptide"
GQPREPQVTTLPPSRDELTKNQVSLTCLVKGFYPSDIAVEWESNGQPENNYKTFPPVLDSDGSFFLYSKLTVDKSRWQQGNVFSCSVMHEALHNHYTQKSLSLSGEC

SEQ ID NO: 94 - protein, 107 aa, Artificial Sequence
  source: /note="Description of Artificial Sequence: Synthetic polypeptide"
GQPREPQVTTLPPSREEMTKNQVSLTCLVKGFYPSDIAVEWESNGQPENNYKTFPPVLDSDGSFFLYSKLTVDKSRWQQGNVFSCSVMHEALHNHYTQKSLSLSGEC

SEQ ID NO: 95 - protein, 110 aa, Artificial Sequence
  source: /note="Description of Artificial Sequence: Synthetic polypeptide"
GQPREPQVYTLPPSRDELTKNQVSLTCLVDGFYPSDIAVEWESNGQPENNYDTTPPVLDSDGSFFLYSDLTVDKSRWQQGNVFSCSVMHEALHNHYTQKSLSLSKSCDKT

SEQ ID NO: 96 - protein, 110 aa, Artificial Sequence
  source: /note="Description of Artificial Sequence: Synthetic polypeptide"
GQPREPQVYTLPPSREEMTKNQVSLTCLVDGFYPSDIAVEWESNGQPENNYDTTPPVLDSDGSFFLYSDLTVDKSRWQQGNVFSCSVMHEALHNHYTQKSLSLSKSCDKT

SEQ ID NO: 97 - protein, 107 aa, Artificial Sequence
  source: /note="Description of Artificial Sequence: Synthetic polypeptide"
GQPREPQVYTLPPSRKKLTKNQVSLTCLVKGFYPSDIAVEWESNGQPENNYKTTPPVLKSDGSFFLYSKLTVDKSRWQQGNVFSCSVMHEALHNHYTQKSLSLSGEC

SEQ ID NO: 98 - protein, 107 aa, Artificial Sequence
  source: /note="Description of Artificial Sequence: Synthetic polypeptide"
GQPREPQVYTLPPSRKKMTKNQVSLTCLVKGFYPSDIAVEWESNGQPENNYKTTPPVLKSDGSFFLYSKLTVDKSRWQQGNVFSCSVMHEALHNHYTQKSLSLSGEC

SEQ ID NO: 99 - protein, 232 aa, Artificial Sequence
  source: /note="Description of Artificial Sequence: Synthetic polypeptide"
EPKSCDKTHTCPPCPAPELLGGPSVFLFPPKPKDTLMISRTPEVTCVVVDVSHEDPEVKFNWYVDGVEVHNAKTKPREEQYQSTYRVVSVLTVLHQDWLNGKEYKCKVSNKALPAPIEKTISKAKGQPREPQVYTLPPSREEMTKNQVSLTCLVKGFYPSDIAVEWESNGQPENNYKTTPPVLDSDGSFFLYSKLTVDKSRWQQGNVFSCSVMHEALHNHYTQKSLSLSPGK

SEQ ID NO: 100 - protein, 222 aa, Artificial Sequence
  source: /note="Description of Artificial Sequence: Synthetic polypeptide"
CPPCPAPELLGGPSVFLFPPKPKDTLMISRTPEVTCVVVDVSHEDPEVKFNWYVDGVEVHNAKTKPREEQYQSTYRVVSVLTVLHQDWLNGKEYKCKVSNKALPAPIEKTISKAKGQPREPQVYTLPPSREEMTKNQVSLTCLVKGFYPSDIAVEWESNGQPENNYKTTPPVLDSDGSFFLYSKLTVDKSRWQQGNVFSCSVMHEALHNHYTQKSLSLSPGK

SEQ ID NO: 101 - protein, 232 aa, Artificial Sequence
  source: /note="Description of Artificial Sequence: Synthetic polypeptide"
EPKSCDKTHTCPPCPAPELLGGPSVFLFPPKPKDTLMISRTPEVTCVVVDVSHEDPEVKFNWYVDGVEVHNAKTKPREEQYQSTYRVVSVLTVLHQDWLNGKEYKCKVSNKALPAPIEKTISKAKGQPREPQVYTLPPSREEMTKNQVSLSCAVKGFYPSDIAVEWESNGQPENNYKTTPPVLDSDGSFFLVSKLTVDKSRWQQGNVFSCSVMHEALHNHYTQKSLSLSPGK

SEQ ID NO: 102 - protein, 222 aa, Artificial Sequence
  source: /note="Description of Artificial Sequence: Synthetic polypeptide"
CPPCPAPELLGGPSVFLFPPKPKDTLMISRTPEVTCVVVDVSHEDPEVKFNWYVDGVEVHNAKTKPREEQYQSTYRVVSVLTVLHQDWLNGKEYKCKVSNKALPAPIEKTISKAKGQPREPQVYTLPPSREEMTKNQVSLWCLVKGFYPSDIAVEWESNGQPENNYKTTPPVLDSDGSFFLYSKLTVDKSRWQQGNVFSCSVMHEALHNHYTQKSLSLSPGK

SEQ ID NO: 103 - protein, 232 aa, Artificial Sequence
  source: /note="Description of Artificial Sequence: Synthetic polypeptide"
EPKSCDKTHTCPPCPAPELLGGPSVFLFPPKPKDTLMISRTPEVTCVVVDVSHEDPEVKFNWYVDGVEVHNAKTKPREEQYQSTYRVVSVLTVLHQDWLNGKEYKCKVSNKALPAPIEKTISKAKGQPREPQVYTLPPSREEMTKNQVSLWCLVKGFYPSDIAVEWESNGQPENNYKTTPPVLDSDGSFFLYSKLTVDKSRWQQGNVFSCSVMHEALHNHYTQKSLSLSPGK

SEQ ID NO: 104 - protein, 222 aa, Artificial Sequence
  source: /note="Description of Artificial Sequence: Synthetic polypeptide"
CPPCPAPELLGGPSVFLFPPKPKDTLMISRTPEVTCVVVDVSHEDPEVKFNWYVDGVEVHNAKTKPREEQYQSTYRVVSVLTVLHQDWLNGKEYKCKVSNKALPAPIEKTISKAKGQPREPQVYTLPPSREEMTKNQVSLSCAVKGFYPSDIAVEWESNGQPENNYKTTPPVLDSDGSFFLVSKLTVDKSRWQQGNVFSCSVMHEALHNHYTQKSLSLSPGK

SEQ ID NO: 105 - protein, 232 aa, Artificial Sequence
  source: /note="Description of Artificial Sequence: Synthetic polypeptide"
EPKSCDKTHTCPPCPAPELLGGPSVFLFPPKPKDTLMISRTPEVTCVVVDVSHEDPEVKFNWYVDGVEVHNAKTKPREEQYQSTYRVVSVLTVLHQDWLNGKEYKCKVSNKALPAPIEKTISKAKGQPREPQVCTLPPSREEMTKNQVSLSCAVKGFYPSDIAVEWESNGQPENNYKTTPPVLDSDGSFFLVSKLTVDKSRWQQGNVFSCSVMHEALHNHYTQKSLSLSPGK

SEQ ID NO: 106 - protein, 222 aa, Artificial Sequence
  source: /note="Description of Artificial Sequence: Synthetic polypeptide"
CPPCPAPELLGGPSVFLFPPKPKDTLMISRTPEVTCVVVDVSHEDPEVKFNWYVDGVEVHNAKTKPREEQYQSTYRVVSVLTVLHQDWLNGKEYKCKVSNKALPAPIEKTISKAKGQPREPQVYTLPPCREEMTKNQVSLWCLVKGFYPSDIAVEWESNGQPENNYKTTPPVLDSDGSFFLYSKLTVDKSRWQQGNVFSCSVMHEALHNHYTQKSLSLSPGK

SEQ ID NO: 107 - protein, 232 aa, Artificial Sequence
  source: /note="Description of Artificial Sequence: Synthetic polypeptide"
EPKSCDKTHTCPPCPAPELLGGPSVFLFPPKPKDTLMISRTPEVTCVVVDVSHEDPEVKFNWYVDGVEVHNAKTKPREEQYQSTYRVVSVLTVLHQDWLNGKEYKCKVSNKALPAPIEKTISKAKGQPREPQVYTLPPCREEMTKNQVSLWCLVKGFYPSDIAVEWESNGQPENNYKTTPPVLDSDGSFFLYSKLTVDKSRWQQGNVFSCSVMHEALHNHYTQKSLSLSPGK

SEQ ID NO: 108 - protein, 222 aa, Artificial Sequence
  source: /note="Description of Artificial Sequence: Synthetic polypeptide"
CPPCPAPELLGGPSVFLFPPKPKDTLMISRTPEVTCVVVDVSHEDPEVKFNWYVDGVEVHNAKTKPREEQYQSTYRVVSVLTVLHQDWLNGKEYKCKVSNKALPAPIEKTISKAKGQPREPQVCTLPPSREEMTKNQVSLSCAVKGFYPSDIAVEWESNGQPENNYKTTPPVLDSDGSFFLVSKLTVDKSRWQQGNVFSCSVMHEALHNHYTQKSLSLSPGK

SEQ ID NO: 109 - protein, 232 aa, Artificial Sequence
  source: /note="Description of Artificial Sequence: Synthetic polypeptide"
EPKSCDKTHTCPPCPAPELLGGPSVFLFPPKPKDTLMISRTPEVTCVVVDVSHEDPEVKFNWYVDGVEVHNAKTKPREEQYQSTYRVVSVLTVLHQDWLNGKEYKCKVSNKALPAPIEKTISKAKGQPREPQVYTLPPSREEMTKNQVSLTCLVKGFYPSDIAVEWESNGQPENNYKTTPPVLDSDGSFFLTSKLTVDKSRWQQGNVFSCSVMHEALHNHYTQKSLSLSPGK

SEQ ID NO: 110 - protein, 222 aa, Artificial Sequence
  source: /note="Description of Artificial Sequence: Synthetic polypeptide"
CPPCPAPELLGGPSVFLFPPKPKDTLMISRTPEVTCVVVDVSHEDPEVKFNWYVDGVEVHNAKTKPREEQYQSTYRVVSVLTVLHQDWLNGKEYKCKVSNKALPAPIEKTISKAKGQPREPQVYTLPPSREEMTKNQVSLYCLVKGFYPSDIAVEWESNGQPENNYKTTPPVLDSDGSFFLYSKLTVDKSRWQQGNVFSCSVMHEALHNHYTQKSLSLSPGK

SEQ ID NO: 111 - protein, 232 aa, Artificial Sequence
  source: /note="Description of Artificial Sequence: Synthetic polypeptide"
EPKSCDKTHTCPPCPAPELLGGPSVFLFPPKPKDTLMISRTPEVTCVVVDVSHEDPEVKFNWYVDGVEVHNAKTKPREEQYQSTYRVVSVLTVLHQDWLNGKEYKCKVSNKALPAPIEKTISKAKGQPREPQVYTLPPSREEMTKNQVSLYCLVKGFYPSDIAVEWESNGQPENNYKTTPPVLDSDGSFFLYSKLTVDKSRWQQGNVFSCSVMHEALHNHYTQKSLSLSPGK

SEQ ID NO: 112 - protein, 222 aa, Artificial Sequence
  source: /note="Description of Artificial Sequence: Synthetic polypeptide"
CPPCPAPELLGGPSVFLFPPKPKDTLMISRTPEVTCVVVDVSHEDPEVKFNWYVDGVEVHNAKTKPREEQYQSTYRVVSVLTVLHQDWLNGKEYKCKVSNKALPAPIEKTISKAKGQPREPQVYTLPPSREEMTKNQVSLTCLVKGFYPSDIAVEWESNGQPENNYKTTPPVLDSDGSFFLTSKLTVDKSRWQQGNVFSCSVMHEALHNHYTQKSLSLSPGK

SEQ ID NO: 113 - protein, 232 aa, Artificial Sequence
  source: /note="Description of Artificial Sequence: Synthetic polypeptide"
EPKSCDKTCCCPPCPAPELLGGPSVFLFPPKPKDTLMISRTPEVTCVVVDVSHEDPEVKFNWYVDGVEVHNAKTKPREEQYQSTYRVVSVLTVLHQDWLNGKEYKCKVSNKALPAPIEKTISKAKGQPREPQVYTLPPSREEMTKNQVSLSCAVKGFYPSDIAVEWESNGQPENNYKTTPPVLDSDGSFFLVSKLTVDKSRWQQGNVFSCSVMHEALHNHYTQKSLSLSPGK

SEQ ID NO: 114 - protein, 222 aa, Artificial Sequence; identical to SEQ ID NO: 102
  source: /note="Description of Artificial Sequence: Synthetic polypeptide"

SEQ ID NO: 115 - protein, 232 aa, Artificial Sequence
  source: /note="Description of Artificial Sequence: Synthetic polypeptide"
EPKSCDKCHTCPPCPAPELLGGPSVFLFPPKPKDTLMISRTPEVTCVVVDVSHEDPEVKFNWYVDGVEVHNAKTKPREEQYQSTYRVVSVLTVLHQDWLNGKEYKCKVSNKALPAPIEKTISKAKGQPREPQVYTLPPSREEMTKNQVSLSCAVKGFYPSDIAVEWESNGQPENNYKTTPPVLDSDGSFFLVSKLTVDKSRWQQGNVFSCSVMHEALHNHYTQKSLSLSPGK

SEQ ID NO: 116 - protein, 222 aa, Artificial Sequence; identical to SEQ ID NO: 102
  source: /note="Description of Artificial Sequence: Synthetic polypeptide"

SEQ ID NO: 117 - protein, 235 aa, Artificial Sequence
  source: /note="Description of Artificial Sequence: Synthetic polypeptide"
EPKSCDKTHTCPPCPAPELLGGPSVFLFPPKPKDTLMISRTPEVTCVVVDVSHEDPEVKFNWYVDGVEVHNAKTKPREEQYQSTYRVVSVLTVLHQDWLNGKEYKCKVSNKALPAPIEKTISKAKGQPREPQVYTLPPSREEMTKNQVSLSCAVKGFYPSDIAVEWESNGQPENNYKTTPPVLDSDGSFFLVSKLTVDKSRWQQGNVFSCSVMHEALHNHYTQKSLSLSKSCDKT

SEQ ID NO: 118 - protein, 222 aa, Artificial Sequence
  source: /note="Description of Artificial Sequence: Synthetic polypeptide"
CPPCPAPELLGGPSVFLFPPKPKDTLMISRTPEVTCVVVDVSHEDPEVKFNWYVDGVEVHNAKTKPREEQYQSTYRVVSVLTVLHQDWLNGKEYKCKVSNKALPAPIEKTISKAKGQPREPQVYTLPPSREEMTKNQVSLWCLVKGFYPSDIAVEWESNGQPENNYKTTPPVLDSDGSFFLYSKLTVDKSRWQQGNVFSCSVMHEALHNHYTQKSLSLSGEC

SEQ ID NO: 119 - protein, 232 aa, Artificial Sequence
  source: /note="Description of Artificial Sequence: Synthetic polypeptide"
EPKSCDKTHTCPPCPAPELLGGPSVFLFPPKPKDTLMISRTPEVTCVVVDVSHEDPEVKFNWYVDGVEVHNAKTKPREEQYQSTYRVVSVLTVLHQDWLNGKEYKCKVSNKALPAPIEKTISKAKGQPREPQVYTLPPSREEMTKNQVSLWCLVKGFYPSDIAVEWESNGQPENNYKTTPPVLDSDGSFFLYSKLTVDKSRWQQGNVFSCSVMHEALHNHYTQKSLSLSGEC

SEQ ID NO: 120 - protein, 225 aa, Artificial Sequence
  source: /note="Description of Artificial Sequence: Synthetic polypeptide"
CPPCPAPELLGGPSVFLFPPKPKDTLMISRTPEVTCVVVDVSHEDPEVKFNWYVDGVEVHNAKTKPREEQYQSTYRVVSVLTVLHQDWLNGKEYKCKVSNKALPAPIEKTISKAKGQPREPQVYTLPPSREEMTKNQVSLSCAVKGFYPSDIAVEWESNGQPENNYKTTPPVLDSDGSFFLVSKLTVDKSRWQQGNVFSCSVMHEALHNHYTQKSLSLSKSCDKT

SEQ ID NO: 121 - protein, 232 aa, Artificial Sequence
  source: /note="Description of Artificial Sequence: Synthetic polypeptide"
EPKSCDKTHTCPPCPAPELLGGPSVFLFPPKPKDTLMISRTPEVTCVVVDVSHEDPEVKFNWYVDGVEVHNAKTKPREEQYQSTYRVVSVLTVLHQDWLNGKEYKCKVSNKALPAPIEKTISKAKGQPREPQVYTLPPSREEMTKNQVSLSCAVKGFYPSDIAVEWESNGQPENNYKTTPPVLDSDGSFFLVSKLTVDKSRWQQGNVFSCSVMHEALHNHYTQKSLSLSGEC

SEQ ID NO: 122 - protein, 225 aa, Artificial Sequence
  source: /note="Description of Artificial Sequence: Synthetic polypeptide"
CPPCPAPELLGGPSVFLFPPKPKDTLMISRTPEVTCVVVDVSHEDPEVKFNWYVDGVEVHNAKTKPREEQYQSTYRVVSVLTVLHQDWLNGKEYKCKVSNKALPAPIEKTISKAKGQPREPQVYTLPPSREEMTKNQVSLWCLVKGFYPSDIAVEWESNGQPENNYKTTPPVLDSDGSFFLYSKLTVDKSRWQQGNVFSCSVMHEALHNHYTQKSLSLSKSCDKT

SEQ ID NO: 123 - protein, 235 aa, Artificial Sequence
  source: /note="Description of Artificial Sequence: Synthetic polypeptide"
EPKSCDKTHTCPPCPAPELLGGPSVFLFPPKPKDTLMISRTPEVTCVVVDVSHEDPEVKFNWYVDGVEVHNAKTKPREEQYQSTYRVVSVLTVLHQDWLNGKEYKCKVSNKALPAPIEKTISKAKGQPREPQVYTLPPSREEMTKNQVSLWCLVKGFYPSDIAVEWESNGQPENNYKTTPPVLDSDGSFFLYSKLTVDKSRWQQGNVFSCSVMHEALHNHYTQKSLSLSKSCDKT

SEQ ID NO: 124 - protein, 222 aa, Artificial Sequence
  source: /note="Description of Artificial Sequence: Synthetic polypeptide"
CPPCPAPELLGGPSVFLFPPKPKDTLMISRTPEVTCVVVDVSHEDPEVKFNWYVDGVEVHNAKTKPREEQYQSTYRVVSVLTVLHQDWLNGKEYKCKVSNKALPAPIEKTISKAKGQPREPQVYTLPPSREEMTKNQVSLSCAVKGFYPSDIAVEWESNGQPENNYKTTPPVLDSDGSFFLVSKLTVDKSRWQQGNVFSCSVMHEALHNHYTQKSLSLSGEC

SEQ ID NO: 125 - protein, 235 aa, Artificial Sequence
  source: /note="Description of Artificial Sequence: Synthetic polypeptide"
EPKSCDKTHTCPPCPAPELLGGPSVFLFPPKPKDTLMISRTPEVTCVVVDVSHEDPEVKFNWYVDGVEVHNAKTKPREEQYQSTYRVVSVLTVLHQDWLNGKEYKCKVSNKALPAPIEKTISKAKGQPREPQVYTLPPSREEMTKNQVHLTCLVKGFYPSDIAVEWESNGQPENNYKTTPPVLDSDGSFALYSKLTVDKSRWQQGNVFSCSVMHEALHNHYTQKSLSLSKSCDKT

SEQ ID NO: 126 - protein, 222 aa, Artificial Sequence
  source: /note="Description of Artificial Sequence: Synthetic polypeptide"
CPPCPAPELLGGPSVFLFPPKPKDTLMISRTPEVTCVVVDVSHEDPEVKFNWYVDGVEVHNAKTKPREEQYQSTYRVVSVLTVLHQDWLNGKEYKCKVSNKALPAPIEKTISKAKGQPREPQVTTLPPSREEMTKNQVSLTCLVKGFYPSDIAVEWESNGQPENNYKTFPPVLDSDGSFFLYSKLTVDKSRWQQGNVFSCSVMHEALHNHYTQKSLSLSGEC

SEQ ID NO: 127 - protein, 232 aa, Artificial Sequence
  source: /note="Description of Artificial Sequence: Synthetic polypeptide"
EPKSCDKTHTCPPCPAPELLGGPSVFLFPPKPKDTLMISRTPEVTCVVVDVSHEDPEVKFNWYVDGVEVHNAKTKPREEQYQSTYRVVSVLTVLHQDWLNGKEYKCKVSNKALPAPIEKTISKAKGQPREPQVTTLPPSREEMTKNQVSLTCLVKGFYPSDIAVEWESNGQPENNYKTFPPVLDSDGSFFLYSKLTVDKSRWQQGNVFSCSVMHEALHNHYTQKSLSLSGEC

SEQ ID NO: 128 - protein, 225 aa, Artificial Sequence
  source: /note="Description of Artificial Sequence: Synthetic polypeptide"
CPPCPAPELLGGPSVFLFPPKPKDTLMISRTPEVTCVVVDVSHEDPEVKFNWYVDGVEVHNAKTKPREEQYQSTYRVVSVLTVLHQDWLNGKEYKCKVSNKALPAPIEKTISKAKGQPREPQVYTLPPSREEMTKNQVHLTCLVKGFYPSDIAVEWESNGQPENNYKTTPPVLDSDGSFALYSKLTVDKSRWQQGNVFSCSVMHEALHNHYTQKSLSLSKSCDKT

SEQ ID NO: 129 - protein, 235 aa, Artificial Sequence
  source: /note="Description of Artificial Sequence: Synthetic polypeptide"
EPKSCDKTHTCPPCPAPELLGGPSVFLFPPKPKDTLMISRTPEVTCVVVDVSHEDPEVKFNWYVDGVEVHNAKTKPREEQYQSTYRVVSVLTVLHQDWLNGKEYKCKVSNKALPAPIEKTISKAKGQPREPQVYTLPPSREEMTKNQVSLTCLVDGFYPSDIAVEWESNGQPENNYDTTPPVLDSDGSFFLYSDLTVDKSRWQQGNVFSCSVMHEALHNHYTQKSLSLSKSCDKT

SEQ ID NO: 130 - protein, 222 aa, Artificial Sequence
  source: /note="Description of Artificial Sequence: Synthetic polypeptide"
CPPCPAPELLGGPSVFLFPPKPKDTLMISRTPEVTCVVVDVSHEDPEVKFNWYVDGVEVHNAKTKPREEQYQSTYRVVSVLTVLHQDWLNGKEYKCKVSNKALPAPIEKTISKAKGQPREPQVYTLPPSRKKMTKNQVSLTCLVKGFYPSDIAVEWESNGQPENNYKTTPPVLKSDGSFFLYSKLTVDKSRWQQGNVFSCSVMHEALHNHYTQKSLSLSGEC

SEQ ID NO: 131 - protein, 232 aa, Artificial Sequence
  source: /note="Description of Artificial Sequence: Synthetic polypeptide"
EPKSCDKTHTCPPCPAPELLGGPSVFLFPPKPKDTLMISRTPEVTCVVVDVSHEDPEVKFNWYVDGVEVHNAKTKPREEQYQSTYRVVSVLTVLHQDWLNGKEYKCKVSNKALPAPIEKTISKAKGQPREPQVYTLPPSRKKMTKNQVSLTCLVKGFYPSDIAVEWESNGQPENNYKTTPPVLKSDGSFFLYSKLTVDKSRWQQGNVFSCSVMHEALHNHYTQKSLSLSGEC

SEQ ID NO: 132 - protein, 225 aa, Artificial Sequence
  source: /note="Description of Artificial Sequence: Synthetic polypeptide"
CPPCPAPELLGGPSVFLFPPKPKDTLMISRTPEVTCVVVDVSHEDPEVKFNWYVDGVEVHNAKTKPREEQYQSTYRVVSVLTVLHQDWLNGKEYKCKVSNKALPAPIEKTISKAKGQPREPQVYTLPPSREEMTKNQVSLTCLVDGFYPSDIAVEWESNGQPENNYDTTPPVLDSDGSFFLYSDLTVDKSRWQQGNVFSCSVMHEALHNHYTQKSLSLSKSCDKT

SEQ ID NO: 133 - protein, 232 aa, Artificial Sequence
  source: /note="Description of Artificial Sequence: Synthetic polypeptide"
EPKSCDKTHTCPSCPAPEFLGGPSVFLFPPKPKDTLMISRTPEVTCVVVDVSQEDPEVQFNWYVDGVEVHNAKTKPREEQFNSKYRVVSVLTVLHQDWLNGKEYKCKVSNKGLPSSIEKTISKAKGQPREPQVYTLPPSREEMTKNQVSLTCLVKGFYPSDIAVEWESNGQPENNYKTTPPVLDSDGSFFLYSKLTVDKSRWQQGNVFSCSVMHEALHNHYTQKSLSLSPGK

SEQ ID NO: 134 - protein, 222 aa, Artificial Sequence
  source: /note="Description of Artificial Sequence: Synthetic polypeptide"
CPSCPAPEFLGGPSVFLFPPKPKDTLMISRTPEVTCVVVDVSQEDPEVQFNWYVDGVEVHNAKTKPREEQFNSKYRVVSVLTVLHQDWLNGKEYKCKVSNKGLPSSIEKTISKAKGQPREPQVYTLPPSREEMTKNQVSLTCLVKGFYPSDIAVEWESNGQPENNYKTTPPVLDSDGSFFLYSKLTVDKSRWQQGNVFSCSVMHEALHNHYTQKSLSLSPGK

SEQ ID NO: 135 - protein, 232 aa, Artificial Sequence
  source: /note="Description of Artificial Sequence: Synthetic polypeptide"
EPKSCDKTHTCPSCPAPEFLGGPSVFLFPPKPKDTLMISRTPEVTCVVVDVSQEDPEVQFNWYVDGVEVHNAKTKPREEQFNSKYRVVSVLTVLHQDWLNGKEYKCKVSNKGLPSSIEKTISKAKGQPREPQVYTLPPSREEMTKNQVSLSCAVKGFYPSDIAVEWESNGQPENNYKTTPPVLDSDGSFFLVSKLTVDKSRWQQGNVFSCSVMHEALHNHYTQKSLSLSPGK

SEQ ID NO: 136 - protein, 222 aa, Artificial Sequence
  source: /note="Description of Artificial Sequence: Synthetic polypeptide"
CPSCPAPEFLGGPSVFLFPPKPKDTLMISRTPEVTCVVVDVSQEDPEVQFNWYVDGVEVHNAKTKPREEQFNSKYRVVSVLTVLHQDWLNGKEYKCKVSNKGLPSSIEKTISKAKGQPREPQVYTLPPSREEMTKNQVSLWCLVKGFYPSDIAVEWESNGQPENNYKTTPPVLDSDGSFFLYSKLTVDKSRWQQGNVFSCSVMHEALHNHYTQKSLSLSPGK

SEQ ID NO: 137 - protein, 232 aa, Artificial Sequence
  source: /note="Description of Artificial Sequence: Synthetic polypeptide"
EPKSCDKTHTCPSCPAPEFLGGPSVFLFPPKPKDTLMISRTPEVTCVVVDVSQEDPEVQFNWYVDGVEVHNAKTKPREEQFNSKYRVVSVLTVLHQDWLNGKEYKCKVSNKGLPSSIEKTISKAKGQPREPQVYTLPPSREEMTKNQVSLWCLVKGFYPSDIAVEWESNGQPENNYKTTPPVLDSDGSFFLYSKLTVDKSRWQQGNVFSCSVMHEALHNHYTQKSLSLSPGK

SEQ ID NO: 138 - protein, 222 aa, Artificial Sequence
  source: /note="Description of Artificial Sequence: Synthetic polypeptide"
CPSCPAPEFLGGPSVFLFPPKPKDTLMISRTPEVTCVVVDVSQEDPEVQFNWYVDGVEVHNAKTKPREEQFNSKYRVVSVLTVLHQDWLNGKEYKCKVSNKGLPSSIEKTISKAKGQPREPQVYTLPPSREEMTKNQVSLSCAVKGFYPSDIAVEWESNGQPENNYKTTPPVLDSDGSFFLVSKLTVDKSRWQQGNVFSCSVMHEALHNHYTQKSLSLSPGK

SEQ ID NO: 139 - protein, 232 aa, Artificial Sequence
  source: /note="Description of Artificial Sequence: Synthetic polypeptide"
EPKSCDKTHTCPSCPAPEFLGGPSVFLFPPKPKDTLMISRTPEVTCVVVDVSQEDPEVQFNWYVDGVEVHNAKTKPREEQFNSKYRVVSVLTVLHQDWLNGKEYKCKVSNKGLPSSIEKTISKAKGQPREPQVCTLPPSREEMTKNQVSLSCAVKGFYPSDIAVEWESNGQPENNYKTTPPVLDSDGSFFLVSKLTVDKSRWQQGNVFSCSVMHEALHNHYTQKSLSLSPGK

SEQ ID NO: 140 - protein, 222 aa, Artificial Sequence
  source: /note="Description of Artificial Sequence: Synthetic polypeptide"
CPSCPAPEFLGGPSVFLFPPKPKDTLMISRTPEVTCVVVDVSQEDPEVQFNWYVDGVEVHNAKTKPREEQFNSKYRVVSVLTVLHQDWLNGKEYKCKVSNKGLPSSIEKTISKAKGQPREPQVYTLPPCREEMTKNQVSLWCLVKGFYPSDIAVEWESNGQPENNYKTTPPVLDSDGSFFLYSKLTVDKSRWQQGNVFSCSVMHEALHNHYTQKSLSLSPGK

SEQ ID NO: 141 - protein, 232 aa, Artificial Sequence
  source: /note="Description of Artificial Sequence: Synthetic polypeptide"
EPKSCDKTHTCPSCPAPEFLGGPSVFLFPPKPKDTLMISRTPEVTCVVVDVSQEDPEVQFNWYVDGVEVHNAKTKPREEQFNSKYRVVSVLTVLHQDWLNGKEYKCKVSNKGLPSSIEKTISKAKGQPREPQVYTLPPCREEMTKNQVSLWCLVKGFYPSDIAVEWESNGQPENNYKTTPPVLDSDGSFFLYSKLTVDKSRWQQGNVFSCSVMHEALHNHYTQKSLSLSPGK

SEQ ID NO: 142 - protein, 222 aa, Artificial Sequence
  source: /note="Description of Artificial Sequence: Synthetic polypeptide"
CPSCPAPEFLGGPSVFLFPPKPKDTLMISRTPEVTCVVVDVSQEDPEVQFNWYVDGVEVHNAKTKPREEQFNSKYRVVSVLTVLHQDWLNGKEYKCKVSNKGLPSSIEKTISKAKGQPREPQVCTLPPSREEMTKNQVSLSCAVKGFYPSDIAVEWESNGQPENNYKTTPPVLDSDGSFFLVSKLTVDKSRWQQGNVFSCSVMHEALHNHYTQKSLSLSPGK

SEQ ID NO: 143 - protein, 232 aa, Artificial Sequence
  source: /note="Description of Artificial Sequence: Synthetic polypeptide"
EPKSCDKTHTCPSCPAPEFLGGPSVFLFPPKPKDTLMISRTPEVTCVVVDVSQEDPEVQFNWYVDGVEVHNAKTKPREEQFNSKYRVVSVLTVLHQDWLNGKEYKCKVSNKGLPSSIEKTISKAKGQPREPQVYTLPPSREEMTKNQVSLTCLVKGFYPSDIAVEWESNGQPENNYKTTPPVLDSDGSFFLTSKLTVDKSRWQQGNVFSCSVMHEALHNHYTQKSLSLSPGK

SEQ ID NO: 144 - protein, 222 aa, Artificial Sequence
  source: /note="Description of Artificial Sequence: Synthetic polypeptide"
CPSCPAPEFLGGPSVFLFPPKPKDTLMISRTPEVTCVVVDVSQEDPEVQFNWYVDGVEVHNAKTKPREEQFNSKYRVVSVLTVLHQDWLNGKEYKCKVSNKGLPSSIEKTISKAKGQPREPQVYTLPPSREEMTKNQVSLYCLVKGFYPSDIAVEWESNGQPENNYKTTPPVLDSDGSFFLYSKLTVDKSRWQQGNVFSCSVMHEALHNHYTQKSLSLSPGK

SEQ ID NO: 145 - protein, 232 aa, Artificial Sequence
  source: /note="Description of Artificial Sequence: Synthetic polypeptide"
EPKSCDKTHTCPSCPAPEFLGGPSVFLFPPKPKDTLMISRTPEVTCVVVDVSQEDPEVQFNWYVDGVEVHNAKTKPREEQFNSKYRVVSVLTVLHQDWLNGKEYKCKVSNKGLPSSIEKTISKAKGQPREPQVYTLPPSREEMTKNQVSLYCLVKGFYPSDIAVEWESNGQPENNYKTTPPVLDSDGSFFLYSKLTVDKSRWQQGNVFSCSVMHEALHNHYTQKSLSLSPGK

SEQ ID NO: 146 - protein, 222 aa, Artificial Sequence
  source: /note="Description of Artificial Sequence: Synthetic polypeptide"
CPSCPAPEFLGGPSVFLFPPKPKDTLMISRTPEVTCVVVDVSQEDPEVQFNWYVDGVEVHNAKTKPREEQFNSKYRVVSVLTVLHQDWLNGKEYKCKVSNKGLPSSIEKTISKAKGQPREPQVYTLPPSREEMTKNQVSLTCLVKGFYPSDIAVEWESNGQPENNYKTTPPVLDSDGSFFLTSKLTVDKSRWQQGNVFSCSVMHEALHNHYTQKSLSLSPGK

SEQ ID NO: 147 - protein, 232 aa, Artificial Sequence
  source: /note="Description of Artificial Sequence: Synthetic polypeptide"
EPKSCDKTCCCPSCPAPEFLGGPSVFLFPPKPKDTLMISRTPEVTCVVVDVSQEDPEVQFNWYVDGVEVHNAKTKPREEQFNSKYRVVSVLTVLHQDWLNGKEYKCKVSNKGLPSSIEKTISKAKGQPREPQVYTLPPSREEMTKNQVSLSCAVKGFYPSDIAVEWESNGQPENNYKTTPPVLDSDGSFFLVSKLTVDKSRWQQGNVFSCSVMHEALHNHYTQKSLSLSPGK

SEQ ID NO: 148 - protein, 222 aa, Artificial Sequence; identical to SEQ ID NO: 136
  source: /note="Description of Artificial Sequence: Synthetic polypeptide"

SEQ ID NO: 149 - protein, 232 aa, Artificial Sequence
  source: /note="Description of Artificial Sequence: Synthetic polypeptide"
EPKSCDKCHTCPSCPAPEFLGGPSVFLFPPKPKDTLMISRTPEVTCVVVDVSQEDPEVQFNWYVDGVEVHNAKTKPREEQFNSKYRVVSVLTVLHQDWLNGKEYKCKVSNKGLPSSIEKTISKAKGQPREPQVYTLPPSREEMTKNQVSLSCAVKGFYPSDIAVEWESNGQPENNYKTTPPVLDSDGSFFLVSKLTVDKSRWQQGNVFSCSVMHEALHNHYTQKSLSLSPGK

SEQ ID NO: 150 - protein, 222 aa, Artificial Sequence; identical to SEQ ID NO: 136
  source: /note="Description of Artificial Sequence: Synthetic polypeptide"

SEQ ID NO: 151 - protein, 235 aa, Artificial Sequence
  source: /note="Description of Artificial Sequence: Synthetic polypeptide"
EPKSCDKTHTCPSCPAPEFLGGPSVFLFPPKPKDTLMISRTPEVTCVVVDVSQEDPEVQFNWYVDGVEVHNAKTKPREEQFNSKYRVVSVLTVLHQDWLNGKEYKCKVSNKGLPSSIEKTISKAKGQPREPQVYTLPPSREEMTKNQVSLSCAVKGFYPSDIAVEWESNGQPENNYKTTPPVLDSDGSFFLVSKLTVDKSRWQQGNVFSCSVMHEALHNHYTQKSLSLSKSCDKT

SEQ ID NO: 152 - protein, 222 aa, Artificial Sequence
  source: /note="Description of Artificial Sequence: Synthetic polypeptide"
CPSCPAPEFLGGPSVFLFPPKPKDTLMISRTPEVTCVVVDVSQEDPEVQFNWYVDGVEVHNAKTKPREEQFNSKYRVVSVLTVLHQDWLNGKEYKCKVSNKGLPSSIEKTISKAKGQPREPQVYTLPPSREEMTKNQVSLWCLVKGFYPSDIAVEWESNGQPENNYKTTPPVLDSDGSFFLYSKLTVDKSRWQQGNVFSCSVMHEALHNHYTQKSLSLSGEC

SEQ ID NO: 153 - protein, 232 aa, Artificial Sequence
  source: /note="Description of Artificial Sequence: Synthetic polypeptide"
EPKSCDKTHTCPSCPAPEFLGGPSVFLFPPKPKDTLMISRTPEVTCVVVDVSQEDPEVQFNWYVDGVEVHNAKTKPREEQFNSKYRVVSVLTVLHQDWLNGKEYKCKVSNKGLPSSIEKTISKAKGQPREPQVYTLPPSREEMTKNQVSLWCLVKGFYPSDIAVEWESNGQPENNYKTTPPVLDSDGSFFLYSKLTVDKSRWQQGNVFSCSVMHEALHNHYTQKSLSLSGEC

SEQ ID NO: 154 - protein, 225 aa, Artificial Sequence
  source: /note="Description of Artificial Sequence: Synthetic polypeptide"
CPSCPAPEFLGGPSVFLFPPKPKDTLMISRTPEVTCVVVDVSQEDPEVQFNWYVDGVEVHNAKTKPREEQFNSKYRVVSVLTVLHQDWLNGKEYKCKVSNKGLPSSIEKTISKAKGQPREPQVYTLPPSREEMTKNQVSLSCAVKGFYPSDIAVEWESNGQPENNYKTTPPVLDSDGSFFLVSKLTVDKSRWQQGNVFSCSVMHEALHNHYTQKSLSLSKSCDKT

SEQ ID NO: 155 - protein, 232 aa, Artificial Sequence
  source: /note="Description of Artificial Sequence: Synthetic polypeptide"
EPKSCDKTHTCPSCPAPEFLGGPSVFLFPPKPKDTLMISRTPEVTCVVVDVSQEDPEVQFNWYVDGVEVHNAKTKPREEQFNSKYRVVSVLTVLHQDWLNGKEYKCKVSNKGLPSSIEKTISKAKGQPREPQVYTLPPSREEMTKNQVSLSCAVKGFYPSDIAVEWESNGQPENNYKTTPPVLDSDGSFFLVSKLTVDKSRWQQGNVFSCSVMHEALHNHYTQKSLSLSGEC

SEQ ID NO: 156 - protein, 225 aa, Artificial Sequence
  source: /note="Description of Artificial Sequence: Synthetic polypeptide"
CPSCPAPEFLGGPSVFLFPPKPKDTLMISRTPEVTCVVVDVSQEDPEVQFNWYVDGVEVHNAKTKPREEQFNSKYRVVSVLTVLHQDWLNGKEYKCKVSNKGLPSSIEKTISKAKGQPREPQVYTLPPSREEMTKNQVSLWCLVKGFYPSDIAVEWESNGQPENNYKTTPPVLDSDGSFFLYSKLTVDKSRWQQGNVFSCSVMHEALHNHYTQKSLSLSKSCDKT

SEQ ID NO: 157 - protein, 235 aa, Artificial Sequence
  source: /note="Description of Artificial Sequence: Synthetic polypeptide"
EPKSCDKTHTCPSCPAPEFLGGPSVFLFPPKPKDTLMISRTPEVTCVVVDVSQEDPEVQFNWYVDGVEVHNAKTKPREEQFNSKYRVVSVLTVLHQDWLNGKEYKCKVSNKGLPSSIEKTISKAKGQPREPQVYTLPPSREEMTKNQVSLWCLVKGFYPSDIAVEWESNGQPENNYKTTPPVLDSDGSFFLYSKLTVDKSRWQQGNVFSCSVMHEALHNHYTQKSLSLSKSCDKT

SEQ ID NO: 158 - protein, 222 aa, Artificial Sequence
  source: /note="Description of Artificial Sequence: Synthetic polypeptide"
CPSCPAPEFLGGPSVFLFPPKPKDTLMISRTPEVTCVVVDVSQEDPEVQFNWYVDGVEVHNAKTKPREEQFNSKYRVVSVLTVLHQDWLNGKEYKCKVSNKGLPSSIEKTISKAKGQPREPQVYTLPPSREEMTKNQVSLSCAVKGFYPSDIAVEWESNGQPENNYKTTPPVLDSDGSFFLVSKLTVDKSRWQQGNVFSCSVMHEALHNHYTQKSLSLSGEC

SEQ ID NO: 159 - protein, 235 aa, Artificial Sequence
  source: /note="Description of Artificial Sequence: Synthetic polypeptide"
EPKSCDKTHTCPSCPAPEFLGGPSVFLFPPKPKDTLMISRTPEVTCVVVDVSQEDPEVQFNWYVDGVEVHNAKTKPREEQFNSKYRVVSVLTVLHQDWLNGKEYKCKVSNKGLPSSIEKTISKAKGQPREPQVYTLPPSREEMTKNQVHLTCLVKGFYPSDIAVEWESNGQPENNYKTTPPVLDSDGSFALYSKLTVDKSRWQQGNVFSCSVMHEALHNHYTQKSLSLSKSCDKT

SEQ ID NO: 160 - protein, 222 aa, Artificial Sequence
  source: /note="Description of Artificial Sequence: Synthetic polypeptide"
CPSCPAPEFLGGPSVFLFPPKPKDTLMISRTPEVTCVVVDVSQEDPEVQFNWYVDGVEVHNAKTKPREEQFNSKYRVVSVLTVLHQDWLNGKEYKCKVSNKGLPSSIEKTISKAKGQPREPQVTTLPPSREEMTKNQVSLTCLVKGFYPSDIAVEWESNGQPENNYKTFPPVLDSDGSFFLYSKLTVDKSRWQQGNVFSCSVMHEALHNHYTQKSLSLSGEC

SEQ ID NO: 161 - protein, 232 aa, Artificial Sequence
  source: /note="Description of Artificial Sequence: Synthetic polypeptide"
EPKSCDKTHTCPSCPAPEFLGGPSVFLFPPKPKDTLMISRTPEVTCVVVDVSQEDPEVQFNWYVDGVEVHNAKTKPREEQFNSKYRVVSVLTVLHQDWLNGKEYKCKVSNKGLPSSIEKTISKAKGQPREPQVTTLPPSREEMTKNQVSLTCLVKGFYPSDIAVEWESNGQPENNYKTFPPVLDSDGSFFLYSKLTVDKSRWQQGNVFSCSVMHEALHNHYTQKSLSLSGEC

SEQ ID NO: 162 - protein, 225 aa, Artificial Sequence
  source: /note="Description of Artificial Sequence: Synthetic polypeptide"
CPSCPAPEFLGGPSVFLFPPKPKDTLMISRTPEVTCVVVDVSQEDPEVQFNWYVDGVEVHNAKTKPREEQFNSKYRVVSVLTVLHQDWLNGKEYKCKVSNKGLPSSIEKTISKAKGQPREPQVYTLPPSREEMTKNQVHLTCLVKGFYPSDIAVEWESNGQPENNYKTTPPVLDSDGSFALYSKLTVDKSRWQQGNVFSCSVMHEALHNHYTQKSLSLSKSCDKT

SEQ ID NO: 163 - protein, 235 aa, Artificial Sequence
  source: /note="Description of Artificial Sequence: Synthetic polypeptide"
EPKSCDKTHTCPSCPAPEFLGGPSVFLFPPKPKDTLMISRTPEVTCVVVDVSQEDPEVQFNWYVDGVEVHNAKTKPREEQFNSKYRVVSVLTVLHQDWLNGKEYKCKVSNKGLPSSIEKTISKAKGQPREPQVYTLPPSREEMTKNQVSLTCLVDGFYPSDIAVEWESNGQPENNYDTTPPVLDSDGSFFLYSDLTVDKSRWQQGNVFSCSVMHEALHNHYTQKSLSLSKSCDKT

SEQ ID NO: 164 - protein, 222 aa, Artificial Sequence
  source: /note="Description of Artificial Sequence: Synthetic polypeptide"
CPSCPAPEFLGGPSVFLFPPKPKDTLMISRTPEVTCVVVDVSQEDPEVQFNWYVDGVEVHNAKTKPREEQFNSKYRVVSVLTVLHQDWLNGKEYKCKVSNKGLPSSIEKTISKAKGQPREPQVYTLPPSRKKMTKNQVSLTCLVKGFYPSDIAVEWESNGQPENNYKTTPPVLKSDGSFFLYSKLTVDKSRWQQGNVFSCSVMHEALHNHYTQKSLSLSGEC

SEQ ID NO: 165 - protein, 232 aa, Artificial Sequence
  source: /note="Description of Artificial Sequence: Synthetic polypeptide"
EPKSCDKTHTCPSCPAPEFLGGPSVFLFPPKPKDTLMISRTPEVTCVVVDVSQEDPEVQFNWYVDGVEVHNAKTKPREEQFNSKYRVVSVLTVLHQDWLNGKEYKCKVSNKGLPSSIEKTISKAKGQPREPQVYTLPPSRKKMTKNQVSLTCLVKGFYPSDIAVEWESNGQPENNYKTTPPVLKSDGSFFLYSKLTVDKSRWQQGNVFSCSVMHEALHNHYTQKSLSLSGEC

SEQ ID NO: 166 - protein, 225 aa, Artificial Sequence
  source: /note="Description of Artificial Sequence: Synthetic polypeptide"
CPSCPAPEFLGGPSVFLFPPKPKDTLMISRTPEVTCVVVDVSQEDPEVQFNWYVDGVEVHNAKTKPREEQFNSKYRVVSVLTVLHQDWLNGKEYKCKVSNKGLPSSIEKTISKAKGQPREPQVYTLPPSREEMTKNQVSLTCLVDGFYPSDIAVEWESNGQPENNYDTTPPVLDSDGSFFLYSDLTVDKSRWQQGNVFSCSVMHEALHNHYTQKSLSLSKSCDKT

SEQ ID NO: 167 - protein, 6 aa, Artificial Sequence
  source: /note="Description of Artificial Sequence: Synthetic peptide"
KSCDKT

SEQ ID NO: 168 - protein, 3 aa, Artificial Sequence
  source: /note="Description of Artificial Sequence: Synthetic peptide"
GEC

SEQ ID NO: 169 - protein, 40 aa, Artificial Sequence
  source: /note="Description of Artificial Sequence: Synthetic polypeptide"
TRPAPPSTATTAGSTPQPESASPSGKEPAASSPSSTNTGS

SEQ ID NO: 170 - DNA, 1482 bp, Artificial Sequence
  source: /note="Description of Artificial Sequence: Synthetic polynucleotide"
gaaccgaaatcatgcgataagacccacacatgccctccctgtccagcacccgagctgctcgggggaccctcggtgttcttgtttcctcccaaacccaaagatacccttatgattagccggacaccagaggtgacgtgcgtggtagtagacgtgtcccatgaggacccggaggtcaagttcaactggtacgtggacggagtggaggtgcacaatgcaaagaccaagccgagggaagagcaataccagtccacatatagagtcgtgtcggtccttacggtcttgcatcaggactggctgaatggcaaagaatacaaatgtaaagtctccaacaaagctctcccagcgcccattgagaaaacaatctcaaaagcgaaaggccaaccgagagaacctcaagtctatactcttcccccgtcgagagaggaaatgaccaaaaaccaggtatccctgtcatgcgcggtcaaggggttttacccaagcgacatcgccgtggagtgggagtcgaacggacagccagagaataactataagacgacccctcccgtgctggattcggatggatcgttctttcttgtcagcaaactcacagtcgacaaatcaaggtggcagcaagggaacgtgttcagctgttcggtaatgcatgaagccctccacaatcactacacgcagaaatccctgtcgctctcaccagggaagggtgggggtggctcagggggtgggggatcaggtggtggtggtagcggaggtggagggagcggaggcggaggctccggtggaggaggttccggaggtggcgggtcagggggaggagggtcatgtccgccgtgccctgcccccgaattgctgggaggtccgtccgtatttctgtttcccccgaagcctaaagatactcttatgatctcgcgaacgccggaagtaacttgtgtcgtggtagatgtctcacacgaagatcccgaagtgaaattcaattggtatgtcgacggcgtggaggtacataacgccaagacgaagcctagagaggaacagtaccagtcaacgtatcgggtcgtatccgtgctcaccgtgctccaccaggattggctgaacggaaaggagtacaagtgcaaagtctcgaacaaggcgttgcctgcgccaatcgaaaagacgatctccaaagctaagggacaaccaagggaaccacaagtgtatactctcccgccctcgcgcgaagagatgacaaagaatcaggtgtcactttggtgcttggtgaaggggttctatccctcggatattgcggtcgagtgggagagcaatggtcaaccggagaacaattacaagacgacaccgcccgtattggactccgacgggtccttctttctctactcgaagctcactgtagataagtcgcgatggcagcaggggaacgtctttagctgttccgtgatgcacgaggcacttcataaccactatacccagaagtcgttgtcgctttcccccggaaaa

SEQ ID NO: 171 - protein, 494 aa, Artificial Sequence
  source: /note="Description of Artificial Sequence: Synthetic polypeptide"
EPKSCDKTHTCPPCPAPELLGGPSVFLFPPKPKDTLMISRTPEVTCVVVDVSHEDPEVKFNWYVDGVEVHNAKTKPREEQYQSTYRVVSVLTVLHQDWLNGKEYKCKVSNKALPAPIEKTISKAKGQPREPQVYTLPPSREEMTKNQVSLSCAVKGFYPSDIAVEWESNGQPENNYKTTPPVLDSDGSFFLVSKLTVDKSRWQQGNVFSCSVMHEALHNHYTQKSLSLSPGKGGGGSGGGGSGGGGSGGGGSGGGGSGGGGSGGGGSGGGGSCPPCPAPELLGGPSVFLFPPKPKDTLMISRTPEVTCVVVDVSHEDPEVKFNWYVDGVEVHNAKTKPREEQYQSTYRVVSVLTVLHQDWLNGKEYKCKVSNKALPAPIEKTISKAKGQPREPQVYTLPPSREEMTKNQVSLWCLVKGFYPSDIAVEWESNGQPENNYKTTPPVLDSDGSFFLYSKLTVDKSRWQQGNVFSCSVMHEALHNHYTQKSLSLSPGK

SEQ ID NO: 172 - DNA, 1482 bp, Artificial Sequence
  source: /note="Description of Artificial Sequence: Synthetic polynucleotide"
gaaccgaaatcatgcgataaaactcacacgtgccctccatgccctgctccggaacttctcgggggaccgtccgtattcctctttcctcctaagcctaaggacaccctcatgatcagcaggacccccgaggtgacgtgtgtagtcgtggatgtgtcccacgaggacccggaagtcaagttcaactggtatgtagatggagtggaggtccataatgccaagaccaagccaagagaggagcagtatcagtcgacttatcgggtggtcagcgtcctcacggtacttcatcaggattggctgaatggaaaggagtacaaatgtaaggtatccaacaaagcgttgccagcgcccatcgaaaagacaatctcgaaggcgaagggacaaccccgggaaccgcaagtgtgtaccctgccaccttcccgggaggagatgacgaaaaaccaggtatccctgtcgtgcgccgtgaaagggttttacccatcggatatcgcagtggagtgggaaagcaatgggcagccggaaaacaactataagaccacgccccctgtactcgactcggatgggtcctttttcctcgtcagcaaacttacggtagacaaaagcaggtggcaacaggggaatgtgttcagctgctcagtcatgcacgaggcactccataaccattacactcagaaatcactgtcgctgtcgcccggtaaagggggaggtgggtcgggcggtgggggaagcggtggtgggggatcaggtgggggaggttcgggaggtggtgggagcggtggaggcggttccggaggaggcgggtcgggtggaggtggatcgtgcccaccgtgccccgcaccggaactccttgggggaccatccgtgtttctgtttccaccgaagccaaaggacactctcatgatctcgcgcacaccagaggtgacatgtgtcgtcgtcgatgtgtcacacgaagatccagaggtcaagtttaactggtacgtggacggagtcgaggtccacaatgcgaaaacgaaacccagagaagagcagtaccagtcaacataccgggtggtgagcgtattgaccgtgcttcaccaggactggcttaacgggaaagagtacaagtgtaaggtcagcaataaggcgctcccagcgcctattgagaaaactatctcgaaagcaaaggggcagccacgagagccccaagtgtgtacgctgccaccctgtcgggaggaaatgaccaagaatcaagtctcgctttggtgccttgtgaagggattctatcccagcgacattgctgtagagtgggagtcgaacgggcaacccgagaataactacaagactactccgccggtgttggactcggacgggtcgttcttcctttatagcaaactcacagtcgacaagtccagatggcagcagggaaatgtcttttcctgctcggtaatgcacgaagcgttgcataaccactatacacagaagtcgctttcgttgtcacccgggaaa

SEQ ID NO: 173 - protein, 494 aa, Artificial Sequence
  source: /note="Description of Artificial Sequence: Synthetic polypeptide"
EPKSCDKTHTCPPCPAPELLGGPSVFLFPPKPKDTLMISRTPEVTCVVVDVSHEDPEVKFNWYVDGVEVHNAKTKPREEQYQSTYRVVSVLTVLHQDWLNGKEYKCKVSNKALPAPIEKTISKAKGQPREPQVCTLPPSREEMTKNQVSLSCAVKGFYPSDIAVEWESNGQPENNYKTTPPVLDSDGSFFLVSKLTVDKSRWQQGNVFSCSVMHEALHNHYTQKSLSLSPGKGGGGSGGGGSGGGGSGGGGSGGGGSGGGGSGGGGSGGGGSCPPCPAPELLGGPSVFLFPPKPKDTLMISRTPEVTCVVVDVSHEDPEVKFNWYVDGVEVHNAKTKPREEQYQSTYRVVSVLTVLHQDWLNGKEYKCKVSNKALPAPIEKTISKAKGQPREPQVYTLPPCREEMTKNQVSLWCLVKGFYPSDIAVEWESNGQPENNYKTTPPVLDSDGSFFLYSKLTVDKSRWQQGNVFSCSVMHEALHNHYTQKSLSLSPGK

SEQ ID NO: 174 - DNA, 1482 bp, Artificial Sequence
  source: /note="Description of Artificial Sequence: Synthetic polynucleotide"
gaaccgaaatcatgcgacaaaacgcacacttgtccgccgtgccctgccccagagttgcttggaggaccatcagtatttctcttccctcctaagccgaaagacacactcatgatctcacgcacaccggaagtaacttgcgtggtggtggatgtgtcgcatgaagatcccgaggtcaaattcaactggtacgtcgacggtgtggaggtgcacaacgccaagacgaaacccagagaagagcagtatcagtcgacctaccgagtggtatccgtgcttacggtgctgcatcaggattggttgaatggaaaagaatacaaatgcaaagtctcgaataaggcgctcccagccccaatcgaaaagacgatttccaaggcgaaggggcagcctcgggaacctcaggtctatacccttcctccgtcacgcgaggaaatgacaaagaatcaggtcagcctcacatgcctcgtgaagggattctatccgtcggatattgctgtcgagtgggaatcgaacggacagcccgagaacaattacaaaacaactcctcccgtacttgactcggacgggagctttttccttacgtcaaagctgaccgtcgataaaagcaggtggcagcaagggaatgtgttttcgtgctcggtcatgcacgaagcacttcataaccactacacccagaaatccttgagcctgtcaccggggaagggaggagggggtagcggcggtggagggagcggaggaggcgggtccggtgggggtgggtccgggggtggcggaagcggtggcggaggttcgggagggggaggaagcggagggggtggatcgtgtcctccgtgcccagcccccgaactcctcgggggaccctcggtattcctttttccgccgaaacccaaggacactttgatgattagccggacgcccgaggtgacatgcgtggtcgtggatgtatcgcatgaggaccccgaagtgaagttcaattggtacgtggatggggtggaagtccataacgcaaagaccaagcccagagaggagcagtaccaatcgacgtatagggtcgtgtccgtcctcacagtcttgcaccaggactggttgaacgggaaggagtataagtgtaaggtcagcaacaaagcgttgcctgcgcccattgaaaagactatctcaaaagcaaagggacagcccagggagccccaagtgtacacactgcccccgtcaagagaagaaatgaccaaaaatcaagtgtccctctactgcttggtgaaggggttctatcccagcgacatcgcggtagagtgggagtcaaatggccagcccgaaaacaactacaaaacgacaccgcccgtgttggattcggatgggtcattctttctgtattcaaaactgacagtggacaagtcgcggtggcaacaggggaacgtgttttcctgttccgtaatgcacgaggcgttgcacaatcactatacgcagaagtccctctcgctttcacccgggaag

SEQ ID NO: 175 - protein, 494 aa, Artificial Sequence
  source: /note="Description of Artificial Sequence: Synthetic polypeptide"
EPKSCDKTHTCPPCPAPELLGGPSVFLFPPKPKDTLMISRTPEVTCVVVDVSHEDPEVKFNWYVDGVEVHNAKTKPREEQYQSTYRVVSVLTVLHQDWLNGKEYKCKVSNKALPAPIEKTISKAKGQPREPQVYTLPPSREEMTKNQVSLTCLVKGFYPSDIAVEWESNGQPENNYKTTPPVLDSDGSFFLTSKLTVDKSRWQQGNVFSCSVMHEALHNHYTQKSLSLSPGKGGGGSGGGGSGGGGSGGGGSGGGGSGGGGSGGGGSGGGGSCPPCPAPELLGGPSVFLFPPKPKDTLMISRTPEVTCVVVDVSHEDPEVKFNWYVDGVEVHNAKTKPREEQYQSTYRVVSVLTVLHQDWLNGKEYKCKVSNKALPAPIEKTISKAKGQPREPQVYTLPPSREEMTKNQVSLYCLVKGFYPSDIAVEWESNGQPENNYKTTPPVLDSDGSFFLYSKLTVDKSRWQQGNVFSCSVMHEALHNHYTQKSLSLSPGK

SEQ ID NO: 176 - DNA, 1482 bp, Artificial Sequence
  source: /note="Description of Artificial Sequence: Synthetic polynucleotide"
gaaccgaaatcatgcgataagacttgctgctgtcctccctgtccagcacccgagctgctcgggggaccctcggtgttcttgtttcctcccaaacccaaagatacccttatgattagccggacaccagaggtgacgtgcgtggtagtagacgtgtcccatgaggacccggaggtcaagttcaactggtacgtggacggagtggaggtgcacaatgcaaagaccaagccgagggaagagcaataccagtccacatatagagtcgtgtcggtccttacggtcttgcatcaggactggctgaatggcaaagaatacaaatgtaaagtctccaacaaagctctcccagcgcccattgagaaaacaatctcaaaagcgaaaggccaaccgagagaacctcaagtctatactcttcccccgtcgagagaggaaatgaccaaaaatcaggtatccctgtcatgcgcggtcaaggggttttacccaagcgacatcgccgtggagtgggagtcgaacggacagccagagaataactataagacgacccctcccgtgctggattcggatggatcgttctttcttgtcagcaaactcacagtcgacaaatcaaggtggcagcaagggaacgtgttcagctgttcggtaatgcatgaagccctccacaatcactacacgcagaaatccctgtcgctctcaccagggaagggtgggggtggctcagggggtgggggatcaggtggtggtggtagcggaggtggagggagcggaggcggaggctccggtggaggaggttccggaggtggcgggtcagggggaggagggtcatgtccgccgtgccctgcccccgaattgctgggaggtccgtccgtatttctgtttcccccgaagcctaaagatactcttatgatctcgcgaacgccggaagtaacttgtgtcgtggtagatgtctcacacgaagatcccgaagtgaaattcaattggtatgtcgacggcgtggaggtacataacgccaagacgaagcctagagaggaacagtaccagtcaacgtatcgggtcgtatccgtgctcaccgtgctccaccaggattggctgaacggaaaggagtacaagtgcaaagtctcgaacaaggcgttgcctgcgccaatcgaaaagacgatctccaaagctaagggacaaccaagggaaccacaagtgtatactctcccgccctcgcgcgaagagatgacaaagaatcaggtgtcactttggtgcttggtgaaggggttctatccctcggatattgcggtcgagtgggagagcaatggtcaaccggagaacaattacaagacgacaccgcccgtattggactccgacgggtccttctttctctactcgaagctcactgtagataagtcgcgatggcagcaggggaacgtctttagctgttccgtgatgcacgaggcacttcataaccactatacccagaagtcgttgtcgctttcccccggaaaa

SEQ ID NO: 177 - protein, 494 aa, Artificial Sequence
  source: /note="Description of Artificial Sequence: Synthetic polypeptide"
EPKSCDKTCCCPPCPAPELLGGPSVFLFPPKPKDTLMISRTPEVTCVVVDVSHEDPEVKFNWYVDGVEVHNAKTKPREEQYQSTYRVVSVLTVLHQDWLNGKEYKCKVSNKALPAPIEKTISKAKGQPREPQVYTLPPSREEMTKNQVSLSCAVKGFYPSDIAVEWESNGQPENNYKTTPPVLDSDGSFFLVSKLTVDKSRWQQGNVFSCSVMHEALHNHYTQKSLSLSPGKGGGGSGGGGSGGGGSGGGGSGGGGSGGGGSGGGGSGGGGSCPPCPAPELLGGPSVFLFPPKPKDTLMISRTPEVTCVVVDVSHEDPEVKFNWYVDGVEVHNAKTKPREEQYQSTYRVVSVLTVLHQDWLNGKEYKCKVSNKALPAPIEKTISKAKGQPREPQVYTLPPSREEMTKNQVSLWCLVKGFYPSDIAVEWESNGQPENNYKTTPPVLDSDGSFFLYSKLTVDKSRWQQGNVFSCSVMHEALHNHYTQKSLSLSPGK

SEQ ID NO: 178 - DNA, 1482 bp, Artificial Sequence
  source: /note="Description of Artificial Sequence: Synthetic polynucleotide"
gaaccgaaatcatgcgataagtgccacacatgccctccctgtccagcacccgagctgctcgggggaccctcggtgttcttgtttcctcccaaacccaaagatacccttatgattagccggacaccagaggtgacgtgcgtggtagtagacgtgtcccatgaggacccggaggtcaagttcaactggtacgtggacggagtggaggtgcacaatgcaaagaccaagccgagggaagagcaataccagtccacatatagagtcgtgtcggtccttacggtcttgcatcaggactggctgaatggcaaagaatacaaatgtaaagtctccaacaaagctctcccagcgcccattgagaaaacaatctcaaaagcgaaaggccaaccgagagaacctcaagtctatactcttcccccgtcgagagaggaaatgaccaaaaaccaggtatccctgtcatgcgcggtcaaggggttttacccaagcgacatcgccgtggagtgggagtcgaacggacagccagagaataactataagacgacccctcccgtgctggattcggatggatcgttctttcttgtcagcaaactcacagtcgacaaatcaaggtggcagcaagggaacgtgttcagctgttcggtaatgcatgaagccctccacaatcactacacgcagaaatccctgtcgctctcaccagggaagggtgggggtggctcagggggtgggggatcaggtggtggtggtagcggaggtggagggagcggaggcggaggctccggtggaggaggttccggaggtggcgggtcagggggaggagggtcatgtccgccgtgccctgcccccgaattgctgggaggtccgtccgtatttctgtttcccccgaagcctaaagatactcttatgatctcgcgaacgccggaagtaacttgtgtcgtggtagatgtctcacacgaagatcccgaagtgaaattcaattggtatgtcgacggcgtggaggtacataacgccaagacgaagcctagagaggaacagtaccagtcaacgtatcgggtcgtatccgtgctcaccgtgctccaccaggattggctgaacggaaaggagtacaagtgcaaagtctcgaacaaggcgttgcctgcgccaatcgaaaagacgatctccaaagctaagggacaaccaagggaaccacaagtgtatactctcccgccctcgcgcgaagagatgacaaagaatcaggtgtcactttggtgcttggtgaaggggttctatccctcggatattgcggtcgagtgggagagcaatggtcaaccggagaacaattacaagacgacaccgcccgtattggactccgacgggtccttctttctctactcgaagctcactgtagataagtcgcgatggcagcaggggaacgtctttagctgttccgtgatgcacgaggcacttcataaccactatacccagaagtcgttgtcgctttcccccggaaaa

SEQ ID NO: 179 - protein, 494 aa, Artificial Sequence
  source: /note="Description of Artificial Sequence: Synthetic polypeptide"
EPKSCDKCHTCPPCPAPELLGGPSVFLFPPKPKDTLMISRTPEVTCVVVDVSHEDPEVKFNWYVDGVEVHNAKTKPREEQYQSTYRVVSVLTVLHQDWLNGKEYKCKVSNKALPAPIEKTISKAKGQPREPQVYTLPPSREEMTKNQVSLSCAVKGFYPSDIAVEWESNGQPENNYKTTPPVLDSDGSFFLVSKLTVDKSRWQQGNVFSCSVMHEALHNHYTQKSLSLSPGKGGGGSGGGGSGGGGSGGGGSGGGGSGGGGSGGGGSGGGGSCPPCPAPELLGGPSVFLFPPKPKDTLMISRTPEVTCVVVDVSHEDPEVKFNWYVDGVEVHNAKTKPREEQYQSTYRVVSVLTVLHQDWLNGKEYKCKVSNKALPAPIEKTISKAKGQPREPQVYTLPPSREEMTKNQVSLWCLVKGFYPSDIAVEWESNGQPENNYKTTPPVLDSDGSFFLYSKLTVDKSRWQQGNVFSCSVMHEALHNHYTQKSLSLSPGK

SEQ ID NO: 180 - DNA, 1491 bp, Artificial Sequence
  source: /note="Description of Artificial Sequence: Synthetic polynucleotide"
gaaccgaaatcatgcgataaaacacacacatgcccaccatgcccagcgcctgaacttttgggaggtccctcggtgtttttgtttcctcctaagcctaaggacaccctgatgatctcccgcactccggaagtgacgtgtgtcgtagtcgacgtcagccatgaggaccctgaggtgaaattcaactggtacgtagatggtgtggaggtgcataatgcaaaaactaagcctcgggaggaacaatatcaaagcacataccgggtcgtgtccgtgctcacggtacttcatcaggattggctcaacgggaaagaatacaaatgtaaggtgtccaacaaggctctcccggcaccgattgagaaaacgatcagcaaggccaaggggcagccccgagaaccccaagtatacacacttcccccgtccagggaggagatgaccaagaaccaggtgtcgctgtcgtgtgcggtcaaggggttttatcccagcgacatcgcggtagagtgggagtcgaacggccagcccgagaacaactacaagacaacaccgcctgtattggactcggacgggtcgtttttcctggtcagcaagctcacagtggataaaagccgctggcagcaggggaatgtattctcctgctccgtcatgcacgaggcgcttcacaaccattacacgcaaaaatccctgtccttgtccaagtcatgcgacaagacgggaggaggagggtcaggcggaggaggaagcgggggtggagggtccggtggtggtgggagcggaggtggagggagcggtggaggtggtagcgggggaggtggatcgggagggggtgggagctgtccgccatgtccagccccggaacttctcgggggaccgtcagtctttctttttccgccgaagcccaaggacaccttgatgattagccgcacgccggaggtcacgtgcgtagtagtggatgtatcccacgaggaccccgaggtcaaattcaattggtatgtcgacggagtggaagtacacaacgcaaagacaaagccgagagaagagcagtaccaatccacttatagggtagtctcggtcttgacagtactgcaccaggactggcttaatggaaaggaatacaagtgcaaagtctcaaacaaagccctccccgcacccatcgaaaagacaatctcgaaagcgaaaggacagcccagagagcctcaagtgtataccctgcccccgtcaagagaagagatgacgaagaaccaagtgtccctctggtgtctcgtgaaaggtttttaccccagcgatattgccgtcgaatgggaaagcaatggtcagcccgaaaacaattacaagactacgcctcccgtattggattcggatggttcgttcttcttgtactcaaagcttactgtcgataagtcgcggtggcagcaaggcaatgtgtttagctgttcggtaatgcatgaggcgctccacaatcactatacacagaagagcttgtccctcagcggggagtgc

SEQ ID NO: 181 - protein, 497 aa, Artificial Sequence
  source: /note="Description of Artificial Sequence: Synthetic polypeptide"
EPKSCDKTHTCPPCPAPELLGGPSVFLFPPKPKDTLMISRTPEVTCVVVDVSHEDPEVKFNWYVDGVEVHNAKTKPREEQYQSTYRVVSVLTVLHQDWLNGKEYKCKVSNKALPAPIEKTISKAKGQPREPQVYTLPPSREEMTKNQVSLSCAVKGFYPSDIAVEWESNGQPENNYKTTPPVLDSDGSFFLVSKLTVDKSRWQQGNVFSCSVMHEALHNHYTQKSLSLSKSCDKTGGGGSGGGGSGGGGSGGGGSGGGGSGGGGSGGGGSGGGGSCPPCPAPELLGGPSVFLFPPKPKDTLMISRTPEVTCVVVDVSHEDPEVKFNWYVDGVEVHNAKTKPREEQYQSTYRVVSVLTVLHQDWLNGKEYKCKVSNKALPAPIEKTISKAKGQPREPQVYTLPPSREEMTKNQVSLWCLVKGFYPSDIAVEWESNGQPENNYKTTPPVLDSDGSFFLYSKLTVDKSRWQQGNVFSCSVMHEALHNHYTQKSLSLSGEC

SEQ ID NO: 182 - DNA, 1422 bp, Artificial Sequence
  source: /note="Description of Artificial Sequence: Synthetic polynucleotide"
gaaccgaaatcatgcgacaagacccacacctgcccaccgtgtccagcgcccgagctcctcggagggccgtcggtgttcctctttcccccaaagcctaaagacactctgatgatcagccgcactccagaagtgacatgtgtggtggtggatgtctcgcatgaggacccggaagtcaaattcaattggtacgtggatggtgtcgaagtgcacaacgccaagacaaaaccgcgcgaggagcagtaccagagcacctaccgggtggtatcagtgcttacagtactgcatcaggattggctgaacggaaaggagtacaagtgtaaagtcagcaacaaagcgctcccggctccgatcgagaaaacgatctcaaaggccaagggccagccgcgagaaccccaagtatacacgttgcccccttcaagggaggaaatgaccaagaatcaggtgtcactgagctgcgccgtcaagggattctacccctcggacattgcagtagagtgggagtcgaatgggcaacccgaaaacaactataagacgacacccccggtcctcgactcagatggatcgttcttccttgtatcaaaattgacggtcgacaagagccggtggcagcaaggtaacgtattttcgtgttcggtgatgcatgaagcgctgcataaccactatacgcagaagagcttgtccttgtcaccaggcaagggaggtgggggttcgggcggaggaggtagcggcggagggggtagcggaggtggcgggtcctgtcccccgtgccccgcaccggagctgctgggaggtccgtcagtgtttttgtttcctcccaagccgaaagacacgctgatgatctcgaggacgcccgaggtaacgtgcgtcgtcgtcgatgtatcccacgaagatcccgaggtcaagttcaactggtatgtagatggggtcgaagtccataacgctaagacaaagccgagagaggaacaatatcagtcaacttatcgggtcgtgtcggtcctgaccgtacttcaccaggactggctcaatgggaaagagtacaaatgcaaggtgtccaataaggcgctgcctgcgccaattgagaaaactatctcgaaagcgaagggacagcccagagagccgcaagtatatacactgccaccctcgagagaagaaatgacgaagaatcaagtctccttgtggtgtttggtgaaggggttttacccttcagacatcgcagtggaatgggaatcgaacgggcagccagaaaacaattacaaaaccacacctcctgtccttgactccgatggctcatttttcctctattcgaagctcactgtcgacaagtcgcgctggcagcagggtaacgtctttagctgctccgtgatgcacgaggccctccacaatcattatacacagaaatcgctgtcactttcgcccggaaaa

SEQ ID NO: 183 - protein, 474 aa, Artificial Sequence
  source: /note="Description of Artificial Sequence: Synthetic polypeptide"
EPKSCDKTHTCPPCPAPELLGGPSVFLFPPKPKDTLMISRTPEVTCVVVDVSHEDPEVKFNWYVDGVEVHNAKTKPREEQYQSTYRVVSVLTVLHQDWLNGKEYKCKVSNKALPAPIEKTISKAKGQPREPQVYTLPPSREEMTKNQVSLSCAVKGFYPSDIAVEWESNGQPENNYKTTPPVLDSDGSFFLVSKLTVDKSRWQQGNVFSCSVMHEALHNHYTQKSLSLSPGKGGGGSGGGGSGGGGSGGGGSCPPCPAPELLGGPSVFLFPPKPKDTLMISRTPEVTCVVVDVSHEDPEVKFNWYVDGVEVHNAKTKPREEQYQSTYRVVSVLTVLHQDWLNGKEYKCKVSNKALPAPIEKTISKAKGQPREPQVYTLPPSREEMTKNQVSLWCLVKGFYPSDIAVEWESNGQPENNYKTTPPVLDSDGSFFLYSKLTVDKSRWQQGNVFSCSVMHEALHNHYTQKSLSLSPGK

SEQ ID NO: 184 - DNA, 1476 bp, Artificial Sequence
  source: /note="Description of Artificial Sequence: Synthetic polynucleotide"
gaaccgaaatcatgcgacaaaacgcacacctgtccgccctgtcctgccccggaacttctcggagggccttccgtgtttctcttccctccgaagcccaaggacacgctgatgatctcccggaccccggaggtcacgtgtgtggtagtagacgtgtcacacgaagatccggaggtgaagttcaactggtacgtagatggcgtggaggtgcacaacgccaaaacgaagccccgagaggaacagtaccagtcaacgtaccgcgtcgtgtcggtattgactgtattgcatcaagactggttgaacgggaaggagtataagtgtaaagtcagcaacaaggctcttcccgcacccattgaaaagacaatttcgaaagccaaaggccagcccagggagccccaagtgtacaccctgccacccagccgggaagagatgacaaagaatcaagtctcgcttagctgcgctgtcaagggcttctatccatcggacattgcagtggaatgggaatcaaacggacagccggagaataactataagacgacaccccctgtcctcgacagcgacgggtcgttcttccttgtgagcaagctcacggtcgacaaaagccgctggcagcagggaaacgtattctcatgttcggtgatgcacgaagcattgcataaccactacacgcagaagagcttgtcgttgagcaaatcatgcgacaagaccgggggtggtgggagcggcggaggaggtagcggcggaggtggctcgggaggaggtgggtcgggtggtgggggaagcggaggcggagggagcggaggtggtgggtcatgtccgccgtgcccggcacccgaactgctcggaggtccctcggtgttcctgttcccgccaaagcctaaggatacgttgatgatttcgcgcacgccggaggtaacatgcgtggtggtggatgtgtcacatgaggaccccgaggtcaagttcaattggtacgtcgatggagtggaagtgcacaatgcgaaaacaaaaccccgggaggagcagtatcagagcacgtacagggtagtctccgtcctgactgtacttcaccaagactggcttaacggaaaagagtataagtgcaaggtcagcaacaaggcgcttcctgcccctatcgagaaaaccatctcgaaggccaagggacagccgagggagcctcaagtatacacgctgccgccatcgagagaagaaatgaccaaaaaccaggtgtccctttggtgtttggtgaagggtttctatccctccgatatcgccgtagagtgggagtcaaatggacagcctgagaacaactataagactacgccccctgtgttggacagcgatgggtcattctttctgtattcgaaactcacggtggataagtcgcgatggcaacagggcaatgtgttttcgtgcagcgtgatgcatgaggcgctgcacaaccactatactcagaaatcgttaagcttatcgggagagtgt

SEQ ID NO: 185 - protein, 492 aa, Artificial Sequence
  source: /note="Description of Artificial Sequence: Synthetic polypeptide"
EPKSCDKTHTCPPCPAPELLGGPSVFLFPPKPKDTLMISRTPEVTCVVVDVSHEDPEVKFNWYVDGVEVHNAKTKPREEQYQSTYRVVSVLTVLHQDWLNGKEYKCKVSNKALPAPIEKTISKAKGQPREPQVYTLPPSREEMTKNQVSLSCAVKGFYPSDIAVEWESNGQPENNYKTTPPVLDSDGSFFLVSKLTVDKSRWQQGNVFSCSVMHEALHNHYTQKSLSLSKSCDKTGGGGSGGGGSGGGGSGGGGSGGGGSGGGGSGGGGSCPPCPAPELLGGPSVFLFPPKPKDTLMISRTPEVTCVVVDVSHEDPEVKFNWYVDGVEVHNAKTKPREEQYQSTYRVVSVLTVLHQDWLNGKEYKCKVSNKALPAPIEKTISKAKGQPREPQVYTLPPSREEMTKNQVSLWCLVKGFYPSDIAVEWESNGQPENNYKTTPPVLDSDGSFFLYSKLTVDKSRWQQGNVFSCSVMHEALHNHYTQKSLSLSGEC

SEQ ID NO: 186 - DNA, 1476 bp, Artificial Sequence
  source: /note="Description of Artificial Sequence: Synthetic polynucleotide"
gaaccgaaatcatgcgacaaaacgcacacctgtccgccctgtcctgccccggaacttctcggagggccttccgtgtttctcttccctccgaagcccaaggacacgctgatgatctcccggaccccggaggtcacgtgtgtggtagtagacgtgtcacacgaagatccggaggtgaagttcaactggtacgtagatggcgtggaggtgcacaacgccaaaacgaagccccgagaggaacagtaccagtcaacgtaccgcgtcgtgtcggtattgactgtattgcatcaagactggttgaacgggaaggagtataagtgtaaagtcagcaacaaggctcttcccgcacccattgaaaagacaatttcgaaagccaaaggccagcccagggagccccaagtgtacaccctgccacccagccgggaagagatgacaaagaatcaagtctcgcttagctgcgctgtcaagggcttctatccatcggacattgcagtggaatgggaatcaaacggacagccggagaataactataagacgacaccccctgtcctcgacagcgacgggtcgttcttccttgtgagcaagctcacggtcgacaaaagccgctggcagcagggaaacgtattctcatgttcggtgatgcacgaagcattgcataaccactacacgcagaagagcttgtcgttgagcggggaatgcggagggggagggtccgggggtggtgggagcggcggaggaggtagcggcggaggtggctcgggaggaggtgggtcgggtggtgggggaagcggaggcggagggtcatgtccgccgtgcccggcacccgaactgctcggaggtccctcggtgttcctgttcccgccaaagcctaaggatacgttgatgatttcgcgcacgccggaggtaacatgcgtggtggtggatgtgtcacatgaggaccccgaggtcaagttcaattggtacgtcgatggagtggaagtgcacaatgcgaaaacaaaaccccgggaggagcagtatcagagcacgtacagggtagtctccgtcctgactgtacttcaccaagactggcttaacggaaaagagtataagtgcaaggtcagcaacaaggcgcttcctgcccctatcgagaaaaccatctcgaaggccaagggacagccgagggagcctcaagtatacacgctgccgccatcgagagaagaaatgaccaaaaaccaggtgtccctttggtgtttggtgaagggtttctatccctccgatatcgccgtagagtgggagtcaaatggacagcctgagaacaactataagactacgccccctgtgttggacagcgatgggtcattctttctgtattcgaaactcacggtggataagtcgcgatggcaacagggcaatgtgttttcgtgcagcgtgatgcatgaggcgctgcacaaccactatactcagaaatcgttaagcttatcgaagtcatgcgacaagact

SEQ ID NO: 187 - protein, 492 aa, Artificial Sequence
  source: /note="Description of Artificial Sequence: Synthetic polypeptide"
EPKSCDKTHTCPPCPAPELLGGPSVFLFPPKPKDTLMISRTPEVTCVVVDVSHEDPEVKFNWYVDGVEVHNAKTKPREEQYQSTYRVVSVLTVLHQDWLNGKEYKCKVSNKALPAPIEKTISKAKGQPREPQVYTLPPSREEMTKNQVSLSCAVKGFYPSDIAVEWESNGQPENNYKTTPPVLDSDGSFFLVSKLTVDKSRWQQGNVFSCSVMHEALHNHYTQKSLSLSGECGGGGSGGGGSGGGGSGGGGSGGGGSGGGGSGGGGSCPPCPAPELLGGPSVFLFPPKPKDTLMISRTPEVTCVVVDVSHEDPEVKFNWYVDGVEVHNAKTKPREEQYQSTYRVVSVLTVLHQDWLNGKEYKCKVSNKALPAPIEKTISKAKGQPREPQVYTLPPSREEMTKNQVSLWCLVKGFYPSDIAVEWESNGQPENNYKTTPPVLDSDGSFFLYSKLTVDKSRWQQGNVFSCSVMHEALHNHYTQKSLSLSKSCDKT

SEQ ID NO: 188 - DNA, 1461 bp, Artificial Sequence
  source: /note="Description of Artificial Sequence: Synthetic polynucleotide"
gaaccgaaatcatgcgacaaaacgcacacctgtccgccctgtcctgccccggaacttctcggagggccttccgtgtttctcttccctccgaagcccaaggacacgctgatgatctcccggaccccggaggtcacgtgtgtggtagtagacgtgtcacacgaagatccggaggtgaagttcaactggtacgtagatggcgtggaggtgcacaacgccaaaacgaagccccgagaggaacagtaccagtcaacgtaccgcgtcgtgtcggtattgactgtattgcatcaagactggttgaacgggaaggagtataagtgtaaagtcagcaacaaggctcttcccgcacccattgaaaagacaatttcgaaagccaaaggccagcccagggagccccaagtgtacaccctgccacccagccgggaagagatgacaaagaatcaagtctcgcttagctgcgctgtcaagggcttctatccatcggacattgcagtggaatgggaatcaaacggacagccggagaataactataagacgacaccccctgtcctcgacagcgacgggtcgttcttccttgtgagcaagctcacggtcgacaaaagccgctggcagcagggaaacgtattctcatgttcggtgatgcacgaagcattgcataaccactacacgcagaagagcttgtcgttgagcaaatcatgcgacaagaccgggggtggtgggagcggcggaggaggtagcggcggaggtggctcgggaggaggtgggtcgggtggtgggggaagcggaggcggagggtcatgtccgccgtgcccggcacccgaactgctcggaggtccctcggtgttcctgttcccgccaaagcctaaggatacgttgatgatttcgcgcacgccggaggtaacatgcgtggtggtggatgtgtcacatgaggaccccgaggtcaagttcaattggtacgtcgatggagtggaagtgcacaatgcgaaaacaaaaccccgggaggagcagtatcagagcacgtacagggtagtctccgtcctgactgtacttcaccaagactggcttaacggaaaagagtataagtgcaaggtcagcaacaaggcgcttcctgcccctatcgagaaaaccatctcgaaggccaagggacagccgagggagcctcaagtatacacgctgccgccatcgagagaagaaatgaccaaaaaccaggtgtccctttggtgtttggtgaagggtttctatccctccgatatcgccgtagagtgggagtcaaatggacagcctgagaacaactataagactacgccccctgtgttggacagcgatgggtcattctttctgtattcgaaactcacggtggataagtcgcgatggcaacagggcaatgtgttttcgtgcagcgtgatgcatgaggcgctgcacaaccactatactcagaaatcgttaagcttatcgggagagtgt

SEQ ID NO: 189 - protein, 487 aa, Artificial Sequence
  source: /note="Description of Artificial Sequence: Synthetic polypeptide"
EPKSCDKTHTCPPCPAPELLGGPSVFLFPPKPKDTLMISRTPEVTCVVVDVSHEDPEVKFNWYVDGVEVHNAKTKPREEQYQSTYRVVSVLTVLHQDWLNGKEYKCKVSNKALPAPIEKTISKAKGQPREPQVYTLPPSREEMTKNQVSLSCAVKGFYPSDIAVEWESNGQPENNYKTTPPVLDSDGSFFLVSKLTVDKSRWQQGNVFSCSVMHEALHNHYTQKSLSLSKSCDKTGGGGSGGGGSGGGGSGGGGSGGGGSGGGGSCPPCPAPELLGGPSVFLFPPKPKDTLMISRTPEVTCVVVDVSHEDPEVKFNWYVDGVEVHNAKTKPREEQYQSTYRVVSVLTVLHQDWLNGKEYKCKVSNKALPAPIEKTISKAKGQPREPQVYTLPPSREEMTKNQVSLWCLVKGFYPSDIAVEWESNGQPENNYKTTPPVLDSDGSFFLYSKLTVDKSRWQQGNVFSCSVMHEALHNHYTQKSLSLSGEC

SEQ ID NO: 190 - DNA, 1446 bp, Artificial Sequence
  source: /note="Description of Artificial Sequence: Synthetic polynucleotide"
gaaccgaaatcatgcgacaaaacgcacacctgtccgccctgtcctgccccggaacttctcggagggccttccgtgtttctcttccctccgaagcccaaggacacgctgatgatctcccggaccccggaggtcacgtgtgtggtagtagacgtgtcacacgaagatccggaggtgaagttcaactggtacgtagatggcgtggaggtgcacaacgccaaaacgaagccccgagaggaacagtaccagtcaacgtaccgcgtcgtgtcggtattgactgtattgcatcaagactggttgaacgggaaggagtataagtgtaaagtcagcaacaaggctcttcccgcacccattgaaaagacaatttcgaaagccaaaggccagcccagggagccccaagtgtacaccctgccacccagccgggaagagatgacaaagaatcaagtctcgcttagctgcgctgtcaagggcttctatccatcggacattgcagtggaatgggaatcaaacggacagccggagaataactataagacgacaccccctgtcctcgacagcgacgggtcgttcttccttgtgagcaagctcacggtcgacaaaagccgctggcagcagggaaacgtattctcatgttcggtgatgcacgaagcattgcataaccactacacgcagaagagcttgtcgttgagcaaatcatgcgacaagaccgggggtggtgggagcggcggaggaggtagcggcggaggtggctcgggaggaggtgggtcgggtggtgggggatcatgtccgccgtgcccggcacccgaactgctcggaggtccctcggtgttcctgttcccgccaaagcctaaggatacgttgatgatttcgcgcacgccggaggtaacatgcgtggtggtggatgtgtcacatgaggaccccgaggtcaagttcaattggtacgtcgatggagtggaagtgcacaatgcgaaaacaaaaccccgggaggagcagtatcagagcacgtacagggtagtctccgtcctgactgtacttcaccaagactggcttaacggaaaagagtataagtgcaaggtcagcaacaaggcgcttcctgcccctatcgagaaaaccatctcgaaggccaagggacagccgagggagcctcaagtatacacgctgccgccatcgagagaagaaatgaccaaaaaccaggtgtccctttggtgtttggtgaagggtttctatccctccgatatcgccgtagagtgggagtcaaatggacagcctgagaacaactataagactacgccccctgtgttggacagcgatgggtcattctttctgtattcgaaactcacggtggataagtcgcgatggcaacagggcaatgtgttttcgtgcagcgtgatgcatgaggcgctgcacaaccactatactcagaaatcgttaagcttatcgggagagtgt

SEQ ID NO: 191 - protein, 482 aa, Artificial Sequence
  source: /note="Description of Artificial Sequence: Synthetic polypeptide"
EPKSCDKTHTCPPCPAPELLGGPSVFLFPPKPKDTLMISRTPEVTCVVVDVSHEDPEVKFNWYVDGVEVHNAKTKPREEQYQSTYRVVSVLTVLHQDWLNGKEYKCKVSNKALPAPIEKTISKAKGQPREPQVYTLPPSREEMTKNQVSLSCAVKGFYPSDIAVEWESNGQPENNYKTTPPVLDSDGSFFLVSKLTVDKSRWQQGNVFSCSVMHEALHNHYTQKSLSLSKSCDKTGGGGSGGGGSGGGGSGGGGSGGGGSCPPCPAPELLGGPSVFLFPPKPKDTLMISRTPEVTCVVVDVSHEDPEVKFNWYVDGVEVHNAKTKPREEQYQSTYRVVSVLTVLHQDWLNGKEYKCKVSNKALPAPIEKTISKAKGQPREPQVYTLPPSREEMTKNQVSLWCLVKGFYPSDIAVEWESNGQPENNYKTTPPVLDSDGSFFLYSKLTVDKSRWQQGNVFSCSVMHEALHNHYTQKSLSLSGEC

SEQ ID NO: 192 - DNA, 1491 bp, Artificial Sequence
  source: /note="Description of Artificial Sequence: Synthetic polynucleotide"
gaaccgaaatcatgcgacaaaacgcacacttgtccgccctgccctgcgcccgaactgcttggaggcccttcggtgtttttgtttccgcccaagcctaaggacaccttgatgatcagccggacaccggaggtcacatgtgtcgtcgtggatgtctcgcacgaggatcccgaggtcaagtttaactggtatgtggatggagtggaggtccacaacgccaaaaccaagcccagggaggagcaataccagtcaacctatcgggtagtctcggtgctgacggtactgcaccaggactggttgaatggaaaagagtacaaatgcaaggtatcaaacaaggcccttcccgctcccatcgaaaagacgatcagcaaagcgaaagggcaacccagagagccccaagtctatacgctgcctccctcaagggaagaaatgacgaaaaaccaggtgcacttgacatgcctcgtgaaaggcttctacccgagcgacattgcggtggaatgggagtcaaatggtcagccggaaaacaactacaagacaactccaccggtccttgattcagacgggtcgttcgccctctatagcaaactcacggtcgacaagtcccgctggcagcagggtaacgtgttttcgtgttcagtgatgcacgaggctctgcataatcactacacacagaagtccctctccttgagcaaaagctgcgacaagacagggggtggaggttcaggcggtggtgggtcgggagggggagggtcaggtggaggcggcagcgggggtgggggatcgggaggaggagggtccgggggagggggttccggagggggtgggtcctgtcccccttgtccagcgccggagctgttgggcggaccttcggtattcttgtttcctcctaagcccaaagatacgcttatgatctcccgcaccccggaggtaacttgcgtcgtagtggatgtatcacatgaggacccagaagtcaagttcaattggtacgtggacggagtcgaagtccataacgctaaaacgaaaccgagagaggaacagtatcagagcacctaccgggtagtgagcgtgctcacagtgttgcatcaggattggctgaatgggaaggaatacaagtgcaaagtgtcgaataaggcattgccagcaccgattgagaaaacaatctcaaaagcgaagggacagccccgagagcctcaagtcactacactgccacccagccgcgaagagatgacaaagaatcaggtatccctcacgtgtcttgtgaaggggttctatccctccgatatcgcagtagagtgggaatcgaacgggcagccggagaacaattacaagactttcccgccagtgcttgattcggacggtagcttctttttgtattcgaagctcacggtagataagtcgaggtggcaacaaggaaatgtgttttcatgttcggtgatgcatgaagcgctccataaccactatacgcagaaatcgctttcgctctccggtgaatgc

SEQ ID NO: 193 - protein, 497 aa, Artificial Sequence
  source: /note="Description of Artificial Sequence: Synthetic polypeptide"
EPKSCDKTHTCPPCPAPELLGGPSVFLFPPKPKDTLMISRTPEVTCVVVDVSHEDPEVKFNWYVDGVEVHNAKTKPREEQYQSTYRVVSVLTVLHQDWLNGKEYKCKVSNKALPAPIEKTISKAKGQPREPQVYTLPPSREEMTKNQVHLTCLVKGFYPSDIAVEWESNGQPENNYKTTPPVLDSDGSFALYSKLTVDKSRWQQGNVFSCSVMHEALHNHYTQKSLSLSKSCDKTGGGGSGGGGSGGGGSGGGGSGGGGSGGGGSGGGGSGGGGSCPPCPAPELLGGPSVFLFPPKPKDTLMISRTPEVTCVVVDVSHEDPEVKFNWYVDGVEVHNAKTKPREEQYQSTYRVVSVLTVLHQDWLNGKEYKCKVSNKALPAPIEKTISKAKGQPREPQVTTLPPSREEMTKNQVSLTCLVKGFYPSDIAVEWESNGQPENNYKTFPPVLDSDGSFFLYSKLTVDKSRWQQGNVFSCSVMHEALHNHYTQKSLSLSGEC

SEQ ID NO: 194 - DNA, 1491 bp, Artificial Sequence
  source: /note="Description of Artificial Sequence: Synthetic polynucleotide"
gaaccgaaatcatgcgacaaaacgcacacttgtccgccgtgcccagcgcccgagttgcttggcggacccagcgtgtttttgtttcccccgaaaccgaaagatacattgatgattagcagaacgcccgaagtgacgtgtgtagtagtcgacgtgtcgcacgaagatccggaggtgaagttcaactggtatgtcgatggggtagaggtgcacaacgcgaaaaccaagcccagggaggagcagtaccagtcgacatatcgggtcgtgtcagtgctgacagtgctccatcaggactggttgaacgggaaggagtataagtgtaaagtcagcaacaaagccctccccgcacccatcgagaaaaccatttccaaggcaaagggacaaccgagggaaccacaagtctacactctcccaccctcccgcgaagaaatgacgaaaaaccaagtgtcactgacgtgtcttgtagatggtttctacccctcggacatcgcggtcgaatgggagtcgaatggacagccggagaacaattacgataccacacctcctgtcttggattcggacggctcattcttcctttacagcgatctcactgtcgacaagtcgcgctggcagcagggaaacgtcttttcctgttcggtaatgcacgaagctctgcacaatcactacacgcagaagtcgctttcactttccaaaagctgcgacaagacagggggtggaggttcaggcggtggtgggtcgggagggggagggtcaggtggaggcggcagcgggggtgggggatcgggaggaggagggtccgggggagggggttccggagggggtgggtcctgtcccccttgtccagcgccggagctgttgggcggaccttcggtattcttgtttcctcctaagcccaaagatacgcttatgatctcccgcaccccggaggtaacttgcgtcgtagtggatgtatcacatgaggacccagaagtcaagttcaattggtacgtggacggagtcgaagtccataacgctaaaacgaaaccgagagaggaacagtatcagagcacctaccgggtagtgagcgtgctcacagtgttgcatcaggattggctgaatgggaaggaatacaagtgcaaagtgtcgaataaggcattgccagcaccgattgagaaaacaatctcaaaagcgaagggacagccccgagagcctcaagtctatacactgccgccaagccggaagaagatgaccaaaaaccaggtgtccctcacgtgcctcgtgaaagggttttacccgtcagatatcgccgtagaatgggagagcaatgggcagcccgagaataactataagactacgccccctgtactcaaatcggacgggtcattctttctgtattcgaagctcacggtagataagtcgaggtggcaacaaggaaatgtgttttcatgttcggtgatgcatgaagcgctccataaccactatacgcagaaatcgctttcgctctccggtgaatgc

SEQ ID NO: 195 - protein, 497 aa, Artificial Sequence
  source: /note="Description of Artificial Sequence: Synthetic polypeptide"
EPKSCDKTHTCPPCPAPELLGGPSVFLFPPKPKDTLMISRTPEVTCVVVDVSHEDPEVKFNWYVDGVEVHNAKTKPREEQYQSTYRVVSVLTVLHQDWLNGKEYKCKVSNKALPAPIEKTISKAKGQPREPQVYTLPPSREEMTKNQVSLTCLVDGFYPSDIAVEWESNGQPENNYDTTPPVLDSDGSFFLYSDLTVDKSRWQQGNVFSCSVMHEALHNHYTQKSLSLSKSCDKTGGGGSGGGGSGGGGSGGGGSGGGGSGGGGSGGGGSGGGGSCPPCPAPELLGGPSVFLFPPKPKDTLMISRTPEVTCVVVDVSHEDPEVKFNWYVDGVEVHNAKTKPREEQYQSTYRVVSVLTVLHQDWLNGKEYKCKVSNKALPAPIEKTISKAKGQPREPQVYTLPPSRKKMTKNQVSLTCLVKGFYPSDIAVEWESNGQPENNYKTTPPVLKSDGSFFLYSKLTVDKSRWQQGNVFSCSVMHEALHNHYTQKSLSLSGEC

SEQ ID NO: 196 - DNA, 1482 bp, Artificial Sequence
  source: /note="Description of Artificial Sequence: Synthetic polynucleotide"
gaaccgaaatcatgcgacaagacccatacatgcccaagctgtcccgctccggagtttctcggtggaccgtcggtgtttctgttccctccgaagccaaaagataccttgatgatttcgcgaactcccgaagtcacgtgtgtcgtcgtggacgtaagccaggaggacccggaggtccagttcaattggtatgtagacggcgtagaggtacataatgcgaaaacgaagcccagagaggaacagttcaatagcaaataccgcgtagtatcggtgctgacagtgttgcaccaggactggctgaatggaaaagaatacaagtgtaaagtgtccaacaagggccttccatcgtcgattgaaaagacaatctccaaggcaaaggggcagcctagggagccccaagtctacaccctgcccccttcgcgggaggagatgacgaagaaccaggtatcactgtcatgcgcggtcaaaggattttacccgagcgacatcgccgtagaatgggagtccaacggacagccagaaaacaattacaagaccactcctccagtgctcgatagcgatggctccttctttcttgtcagcaaattgacagtcgataagtcaagatggcagcagggtaatgtgttctcatgtagcgtcatgcacgaagcactccacaatcattatacacagaagagcctctcgttgtcgcccggaaaaggcggaggtgggtcgggcggagggggaagcggtggaggagggtcaggaggtggaggttccgggggaggcggttcgggaggagggggttcgggtggtggaggatcgggtggcggaggaagctgcccttcatgtccagcccccgagttcctcggaggcccgtcggtctttctttttccccctaagcctaaagataccctgatgatcagccggacgcctgaggtgacttgtgtggtagtcgacgtgtcccaagaagatccggaagtccagtttaactggtatgtggatggagtggaggtccataatgccaagacaaagccaagggaggagcaattcaactcgaagtaccgcgtcgtgtccgtgctcacagtgcttcatcaagactggttgaacggaaaggagtacaaatgtaaggtatcaaacaagggtttgccctcgtccatcgagaaaaccatctcgaaagcgaaagggcaaccccgcgagccccaggtatatacgctcccgccttcaagagaagaaatgacgaaaaaccaagtgagcttgtggtgcctggtcaaggggttctatccctccgatatcgcggtagagtgggaaagcaatgggcagccggagaacaactataagacaacgcctcccgtgttggactcagatggatcgttcttcttgtactcaaagcttacggtggacaagtcacgctggcagcaagggaacgtgttttcgtgctcggtgatgcacgaggcgcttcacaatcactacactcagaaatcgcttagcttgtcaccaggaaaa

SEQ ID NO: 197 - protein, 494 aa, Artificial Sequence
  source: /note="Description of Artificial Sequence: Synthetic polypeptide"
EPKSCDKTHTCPSCPAPEFLGGPSVFLFPPKPKDTLMISRTPEVTCVVVDVSQEDPEVQFNWYVDGVEVHNAKTKPREEQFNSKYRVVSVLTVLHQDWLNGKEYKCKVSNKGLPSSIEKTISKAKGQPREPQVYTLPPSREEMTKNQVSLSCAVKGFYPSDIAVEWESNGQPENNYKTTPPVLDSDGSFFLVSKLTVDKSRWQQGNVFSCSVMHEALHNHYTQKSLSLSPGKGGGGSGGGGSGGGGSGGGGSGGGGSGGGGSGGGGSGGGGSCPSCPAPEFLGGPSVFLFPPKPKDTLMISRTPEVTCVVVDVSQEDPEVQFNWYVDGVEVHNAKTKPREEQFNSKYRVVSVLTVLHQDWLNGKEYKCKVSNKGLPSSIEKTISKAKGQPREPQVYTLPPSREEMTKNQVSLWCLVKGFYPSDIAVEWESNGQPENNYKTTPPVLDSDGSFFLYSKLTVDKSRWQQGNVFSCSVMHEALHNHYTQKSLSLSPGK

SEQ ID NO: 198 - DNA, 1482 bp, Artificial Sequence
  source: /note="Description of Artificial Sequence: Synthetic polynucleotide"
gaaccgaaatcatgcgataagacacacacgtgcccctcgtgccccgcaccggagttccttgggggtccgtcggtctttttgtttccccctaaacccaaggacacgctcatgatctcccgcacaccggaagtcacgtgcgtagtcgtggatgtctcacaagaggacccggaagtgcaattcaactggtacgtcgacggcgtggaggtgcacaatgccaagacgaaaccaagagaggaacagttcaactcaaagtaccgggtagtatcggtgttgacggtgctccatcaggattggcttaacggtaaagagtacaagtgtaaagtcagcaataagggtctgcccagctccatcgaaaagactatctccaaggccaaggggcagcctcgcgaaccgcaagtgtgtacgttgcccccgtcccgggaggagatgacgaaaaatcaggtcagcctctcgtgtgcggtgaaggggttttacccatccgacattgcggtggaatgggagagcaacggacagcccgaaaacaattacaagactaccccgccagtactcgatagcgacgggtcgttctttcttgtgtcgaaactgacagtggacaagtcaagatggcagcaaggaaatgtgttctcgtgtagcgtgatgcacgaggcactccacaatcattacacacagaagagcttgtccctctcccctggtaaaggaggaggagggtcgggtgggggaggcagcgggggaggaggatcaggaggtgggggttcaggcggagggggttcgggtggtgggggatcgggaggtggaggttcgggaggagggggctcctgtccgagctgccccgctcccgagttcttgggaggtccctcagtgtttcttttcccgccgaagcctaaagatacactgatgatttcacgaacccccgaagtgacatgcgtagtagtagatgtgtcgcaagaagatccggaagtccagttcaattggtatgtggatggggtggaggtccataatgcgaaaacaaaaccgcgggaagagcaattcaattcaaagtatagggtcgtcagcgtgctcacagtgctgcaccaggactggcttaatgggaaagaatacaagtgcaaggtatccaacaaggggttgccctcgtcgatcgagaaaacgatttcaaaagccaagggacaaccgagggaaccacaagtatgcacgctgccgccgtgtagggaagaaatgacgaagaaccaagtgagcctctggtgcctggtgaagggcttttatccctccgacatcgcagtcgagtgggaatcgaatgggcagccggagaacaactataagactactcccccagtgttggattcggatggatcatttttcctctactcgaaacttacggtcgacaaatcacgctggcagcagggcaacgtgttttcctgctcggtaatgcatgaggcgcttcacaaccactatacccagaagtcactgtcgcttagcccagggaaa

SEQ ID NO: 199 - protein, 494 aa, Artificial Sequence
  source: /note="Description of Artificial Sequence: Synthetic polypeptide"
EPKSCDKTHTCPSCPAPEFLGGPSVFLFPPKPKDTLMISRTPEVTCVVVDVSQEDPEVQFNWYVDGVEVHNAKTKPREEQFNSKYRVVSVLTVLHQDWLNGKEYKCKVSNKGLPSSIEKTISKAKGQPREPQVCTLPPSREEMTKNQVSLSCAVKGFYPSDIAVEWESNGQPENNYKTTPPVLDSDGSFFLVSKLTVDKSRWQQGNVFSCSVMHEALHNHYTQKSLSLSPGKGGGGSGGGGSGGGGSGGGGSGGGGSGGGGSGGGGSGGGGSCPSCPAPEFLGGPSVFLFPPKPKDTLMISRTPEVTCVVVDVSQEDPEVQFNWYVDGVEVHNAKTKPREEQFNSKYRVVSVLTVLHQDWLNGKEYKCKVSNKGLPSSIEKTISKAKGQPREPQVYTLPPCREEMTKNQVSLWCLVKGFYPSDIAVEWESNGQPENNYKTTPPVLDSDGSFFLYSKLTVDKSRWQQGNVFSCSVMHEALHNHYTQKSLSLSPGK

SEQ ID NO: 200 - DNA, 1482 bp, Artificial Sequence
  source: /note="Description of Artificial Sequence: Synthetic polynucleotide"
gaaccgaaatcatgcgacaagacccatacgtgcccatcgtgccccgcaccggagttcctcggaggcccgtcagtattcctttttcctccgaagcccaaagatacattgatgatcagcaggacgcctgaagtgacatgtgtagtggtagacgtgtcgcaagaagatccagaggtacagtttaactggtatgtcgacggggtggaagtccataacgccaagactaaaccccgcgaagagcagttcaactcaaagtatagagtagtctccgtcctgacagtcctccatcaggactggctgaacgggaaagaatacaagtgcaaagtctcgaacaaagggcttccgtcatcgatcgagaaaacgatttcaaaagccaagggacagcctagggagccgcaagtgtatactctgcccccgtcgcgcgaggagatgacgaaaaatcaggtgtccctcacgtgcctcgtcaaaggattttacccgtcggatatcgccgtggagtgggaatcgaatgggcaaccagagaacaactacaagaccactcccccggtgctggactcggacggctcctttttcttgacatcaaagctcacagtcgataagagccgctggcaacaagggaatgtgttcagctgctcggtgatgcacgaagcgctgcacaaccactatacccagaaatcattgtccctcagccccggaaagggaggtggagggtccggtgggggtggatcaggagggggtgggagcggaggaggcggcagcggtggcggagggtcaggtggaggcggatcaggtgggggaggttcaggcggtgggggctcgtgccccagctgtcctgctcccgagtttctcgggggaccttcagtctttctcttccctccgaaacccaaggacacgctgatgatttcgcggacacccgaagtgacttgtgtcgtggtcgacgtaagccaggaggaccccgaggtgcaattcaactggtacgtcgacggagtcgaggtccacaatgcgaaaacaaaacccagagaagaacagttcaattcgaaatatcgagtggtatcagtcctgaccgtgcttcatcaggattggctcaatgggaaagagtacaaatgcaaggtatcaaacaagggactgccaagctcaatcgaaaagactatctcgaaagcaaagggtcagcctcgggagccccaagtgtacacgcttcccccatccagggaagaaatgacgaagaaccaggtgtcgctctactgtttggtgaaggggttttatccttcggacatcgcggtggaatgggagtcgaatggacagccggagaataactacaaaacgactccgcctgtcctcgacagcgatgggtccttcttcctttactcaaaattgacagtagataagtcgcgctggcagcagggaaatgtattctcctgttccgtcatgcatgaggcgcttcacaatcactacactcagaagtccttgtcgttgtcaccaggaaaa

SEQ ID NO: 201 - protein, 494 aa, Artificial Sequence
  source: /note="Description of Artificial Sequence: Synthetic polypeptide"
EPKSCDKTHTCPSCPAPEFLGGPSVFLFPPKPKDTLMISRTPEVTCVVVDVSQEDPEVQFNWYVDGVEVHNAKTKPREEQFNSKYRVVSVLTVLHQDWLNGKEYKCKVSNKGLPSSIEKTISKAKGQPREPQVYTLPPSREEMTKNQVSLTCLVKGFYPSDIAVEWESNGQPENNYKTTPPVLDSDGSFFLTSKLTVDKSRWQQGNVFSCSVMHEALHNHYTQKSLSLSPGKGGGGSGGGGSGGGGSGGGGSGGGGSGGGGSGGGGSGGGGSCPSCPAPEFLGGPSVFLFPPKPKDTLMISRTPEVTCVVVDVSQEDPEVQFNWYVDGVEVHNAKTKPREEQFNSKYRVVSVLTVLHQDWLNGKEYKCKVSNKGLPSSIEKTISKAKGQPREPQVYTLPPSREEMTKNQVSLYCLVKGFYPSDIAVEWESNGQPENNYKTTPPVLDSDGSFFLYSKLTVDKSRWQQGNVFSCSVMHEALHNHYTQKSLSLSPGK

SEQ ID NO: 202 - DNA, 1482 bp, Artificial Sequence
  source: /note="Description of Artificial Sequence: Synthetic polynucleotide"
gaaccgaaatcatgcgacaagacatgctgttgcccaagctgtcccgctccggagtttctcggtggaccgtcggtgtttctgttccctccgaagccaaaagataccttgatgatttcgcgaactcccgaagtcacgtgtgtcgtcgtggacgtaagccaggaggacccggaggtccagttcaattggtatgtagacggcgtagaggtacataatgcgaaaacgaagcccagagaggaacagttcaatagcaaataccgcgtagtatcggtgctgacagtgttgcaccaggactggctgaatggaaaagaatacaagtgtaaagtgtccaacaagggccttccatcgtcgattgaaaagacaatctccaaggcaaaggggcagcctagggagccccaagtctacaccctgcccccttcgcgggaggagatgacgaagaaccaggtatcactgtcatgcgcggtcaaaggattttacccgagcgacatcgccgtagaatgggagtccaacggacagccagaaaacaattacaagaccactcctccagtgctcgatagcgatggctccttctttcttgtcagcaaattgacagtcgataagtcaagatggcagcagggtaatgtgttctcatgtagcgtcatgcacgaagcactccacaatcattatacacagaagagcctctcgttgtcgcccggaaaaggcggaggtgggtcgggcggagggggaagcggtggaggagggtcaggaggtggaggttccgggggaggcggttcgggaggagggggttcgggtggtggaggatcgggtggcggaggaagctgcccttcatgtccagcccccgagttcctcggaggcccgtcggtctttctttttccccctaagcctaaagataccctgatgatcagccggacgcctgaggtgacttgtgtggtagtcgacgtgtcccaagaagatccggaagtccagtttaactggtatgtggatggagtggaggtccataatgccaagacaaagccaagggaggagcaattcaactcgaagtaccgcgtcgtgtccgtgctcacagtgcttcatcaagactggttgaacggaaaggagtacaaatgtaaggtatcaaacaagggtttgccctcgtccatcgagaaaaccatctcgaaagcgaaagggcaaccccgcgagccccaggtatatacgctcccgccttcaagagaagaaatgactaaaaaccaagtgagcttgtggtgcctggtcaaggggttctatccctccgatatcgcggtagagtgggaaagcaatgggcagccggagaacaactataagacaacgcctcccgtgttggactcagatggatcgttcttcttgtactcaaagcttacggtggacaagtcacgctggcagcaagggaacgtgttttcgtgctcggtgatgcacgaggcgcttcacaatcactacactcagaaatcgcttagcttgtcaccaggaaaa

SEQ ID NO: 203 - protein, 494 aa, Artificial Sequence
  source: /note="Description of Artificial Sequence: Synthetic polypeptide"
EPKSCDKTCCCPSCPAPEFLGGPSVFLFPPKPKDTLMISRTPEVTCVVVDVSQEDPEVQFNWYVDGVEVHNAKTKPREEQFNSKYRVVSVLTVLHQDWLNGKEYKCKVSNKGLPSSIEKTISKAKGQPREPQVYTLPPSREEMTKNQVSLSCAVKGFYPSDIAVEWESNGQPENNYKTTPPVLDSDGSFFLVSKLTVDKSRWQQGNVFSCSVMHEALHNHYTQKSLSLSPGKGGGGSGGGGSGGGGSGGGGSGGGGSGGGGSGGGGSGGGGSCPSCPAPEFLGGPSVFLFPPKPKDTLMISRTPEVTCVVVDVSQEDPEVQFNWYVDGVEVHNAKTKPREEQFNSKYRVVSVLTVLHQDWLNGKEYKCKVSNKGLPSSIEKTISKAKGQPREPQVYTLPPSREEMTKNQVSLWCLVKGFYPSDIAVEWESNGQPENNYKTTPPVLDSDGSFFLYSKLTVDKSRWQQGNVFSCSVMHEALHNHYTQKSLSLSPGK

SEQ ID NO: 204 - DNA, 1482 bp, Artificial Sequence
  source: /note="Description of Artificial Sequence: Synthetic polynucleotide"
gaaccgaaatcatgcgacaagtgccatacatgcccaagctgtcccgctccggagtttctcggtggaccgtcggtgtttctgttccctccgaagccaaaagataccttgatgatttcgcgaactcccgaagtcacgtgtgtcgtcgtggacgtaagccaggaggacccggaggtccagttcaattggtatgtagacggcgtagaggtacataatgcgaaaacgaagcccagagaggaacagttcaatagcaaataccgcgtagtatcggtgctgacagtgttgcaccaggactggctgaatggaaaagaatacaagtgtaaagtgtccaacaagggccttccatcgtcgattgaaaagacaatctccaaggcaaaggggcagcctagggagccccaagtctacaccctgcccccttcgcgggaggagatgacgaagaaccaggtatcactgtcatgcgcggtcaaaggattttacccgagcgacatcgccgtagaatgggagtccaacggacagccagaaaacaattacaagaccactcctccagtgctcgatagcgatggctccttctttcttgtcagcaaattgacagtcgataagtcaagatggcagcagggtaatgtgttctcatgtagcgtcatgcacgaagcactccacaatcattatacacagaagagcctctcgttgtcgcccggaaaaggcggaggtgggtcgggcggagggggaagcggtggaggagggtcaggaggtggaggttccgggggaggcggttcgggaggagggggttcgggtggtggaggatcgggtggcggaggaagctgcccttcatgtccagcccccgagttcctcggaggcccgtcggtctttctttttccccctaagcctaaagataccctgatgatcagccggacgcctgaggtgacttgtgtggtagtcgacgtgtcccaagaagatccggaagtccagtttaactggtatgtggatggagtggaggtccataatgccaagacaaagccaagggaggagcaattcaactcgaagtaccgcgtcgtgtccgtgctcacagtgcttcatcaagactggttgaacggaaaggagtacaaatgtaaggtatcaaacaagggtttgccctcgtccatcgagaaaaccatctcgaaagcgaaagggcaaccccgcgagccccaggtatatacgctcccgccttcaagagaagaaatgacgaaaaaccaagtgagcttgtggtgcctggtcaaggggttctatccctccgatatcgcggtagagtgggaaagcaatgggcagccggagaacaactataagacaacgcctcccgtgttggactcagatggatcgttcttcttgtactcaaagcttacggtggacaagtcacgctggcagcaagggaacgtgttttcgtgctcggtgatgcacgaggcgcttcacaatcactacactcagaaatcgcttagcttgtcaccaggaaaa

SEQ ID NO: 205 - protein, 494 aa, Artificial Sequence
  source: /note="Description of Artificial Sequence: Synthetic polypeptide"
EPKSCDKCHTCPSCPAPEFLGGPSVFLFPPKPKDTLMISRTPEVTCVVVDVSQEDPEVQFNWYVDGVEVHNAKTKPREEQFNSKYRVVSVLTVLHQDWLNGKEYKCKVSNKGLPSSIEKTISKAKGQPREPQVYTLPPSREEMTKNQVSLSCAVKGFYPSDIAVEWESNGQPENNYKTTPPVLDSDGSFFLVSKLTVDKSRWQQGNVFSCSVMHEALHNHYTQKSLSLSPGKGGGGSGGGGSGGGGSGGGGSGGGGSGGGGSGGGGSGGGGSCPSCPAPEFLGGPSVFLFPPKPKDTLMISRTPEVTCVVVDVSQEDPEVQFNWYVDGVEVHNAKTKPREEQFNSKYRVVSVLTVLHQDWLNGKEYKCKVSNKGLPSSIEKTISKAKGQPREPQVYTLPPSREEMTKNQVSLWCLVKGFYPSDIAVEWESNGQPENNYKTTPPVLDSDGSFFLYSKLTVDKSRWQQGNVFSCSVMHEALHNHYTQKSLSLSPGK

SEQ ID NO: 206 - DNA, 1491 bp, Artificial Sequence
  source: /note="Description of Artificial Sequence: Synthetic polynucleotide"
gaaccgaaatcatgcgataaaacgcacacgtgcccctcgtgtccggcaccggagtttcttggaggtccctcggtgttcctgttccctcccaagccgaaggacacgttgatgatttcgaggacgccggaggtgacgtgtgtggtcgtagacgtgagccaggaggacccggaagtgcagtttaactggtacgtcgatggagtagaagtacataatgccaagacgaagcccagggaggaacaattcaattcgaagtatcgcgtcgtatccgtgctgactgtgctccaccaggactggcttaacggaaaagaatacaagtgcaaggtatcaaataagggactcccctcgtcgatcgagaaaacaatcagcaaagcgaaaggacagccgagggaaccgcaagtgtacacattgccgccgtcgcgagaagaaatgaccaagaaccaggtatcactctcgtgcgccgtgaagggcttttacccatcggacattgctgtggagtgggagagcaacggtcaacccgagaataactacaaaactacaccgcccgtgctggattccgacggctcattctttctcgtgtcaaaactgactgtggataagtcgcgctggcaacaggggaatgtgttctcgtgcagcgtcatgcatgaagctcttcataatcactacacccaaaaatccctgtcactctcgaaaagctgtgataagaccgggggtgggggctccggaggaggcggttcgggtggcggtgggtcgggtggaggcggatcgggcggtgggggaagcggtggtggtggaagcggagggggtggatcaggtggagggggcagctgtccatcctgccctgcaccagagtttttgggaggaccgtccgtatttctgtttccgcccaagcccaaagatactttgatgatcagcaggacgcctgaggtaacatgtgtagtggtcgatgtctcgcaagaggaccctgaggtccagttcaattggtacgtggacggggtggaagtccacaacgcgaaaacgaaaccacgcgaagaacagttcaacagcaaatacagagtcgtgtcagtcttgacagtccttcaccaggattggttgaatggaaaggagtacaagtgtaaggtgtcaaacaaaggactgcccagctcgatcgaaaagacaatttcgaaggcaaaaggtcaaccgcgggagccacaagtgtatacgctgccgccctcgcgggaggagatgacaaagaatcaggtgtcgctgtggtgtctggtaaaaggattctatccatccgatatcgcggtagagtgggaatcaaacggccagccggagaacaattacaagaccacgccccctgtattggattcggacggatcgttcttcttgtattcgaaactcacggtggacaagtcgcggtggcagcagggtaatgtgttttcatgctcagtcatgcacgaggcgctccataaccattatactcagaagtcgctgtccttgtccggggagtgc

SEQ ID NO: 207 - protein, 497 aa, Artificial Sequence
  source: /note="Description of Artificial Sequence: Synthetic polypeptide"
EPKSCDKTHTCPSCPAPEFLGGPSVFLFPPKPKDTLMISRTPEVTCVVVDVSQEDPEVQFNWYVDGVEVHNAKTKPREEQFNSKYRVVSVLTVLHQDWLNGKEYKCKVSNKGLPSSIEKTISKAKGQPREPQVYTLPPSREEMTKNQVSLSCAVKGFYPSDIAVEWESNGQPENNYKTTPPVLDSDGSFFLVSKLTVDKSRWQQGNVFSCSVMHEALHNHYTQKSLSLSKSCDKTGGGGSGGGGSGGGGSGGGGSGGGGSGGGGSGGGGSGGGGSCPSCPAPEFLGGPSVFLFPPKPKDTLMISRTPEVTCVVVDVSQEDPEVQFNWYVDGVEVHNAKTKPREEQFNSKYRVVSVLTVLHQDWLNGKEYKCKVSNKGLPSSIEKTISKAKGQPREPQVYTLPPSREEMTKNQVSLWCLVKGFYPSDIAVEWESNGQPENNYKTTPPVLDSDGSFFLYSKLTVDKSRWQQGNVFSCSVMHEALHNHYTQKSLSLSGEC

SEQ ID NO: 208 - DNA, 1422 bp, Artificial Sequence
  source: /note="Description of Artificial Sequence: Synthetic polynucleotide"
gaaccgaaatcatgcgacaagacccatacatgcccaagctgtcccgctccggagtttctcggtggaccgtcggtgtttctgttccctccgaagccaaaagataccttgatgatttcgcgaactcccgaagtcacgtgtgtcgtcgtggacgtaagccaggaggacccggaggtccagttcaattggtatgtagacggcgtagaggtacataatgcgaaaacgaagcccagagaggaacagttcaatagcaaataccgcgtagtatcggtgctgacagtgttgcaccaggactggctgaatggaaaagaatacaagtgtaaagtgtccaacaagggccttccatcgtcgattgaaaagacaatctccaaggcaaaggggcagcctagggagccccaagtctacaccctgcccccttcgcgggaggagatgacgaagaaccaggtatcactgtcatgcgcggtcaaaggattttacccgagcgacatcgccgtagaatgggagtccaacggacagccagaaaacaattacaagaccactcctccagtgctcgatagcgatggctccttctttcttgtcagcaaattgacagtcgataagtcaagatggcagcagggtaatgtgttctcatgtagcgtcatgcacgaagcactccacaatcattatacacagaagagcctctcgttgtcgcccggaaaaggcggaggtgggtcgggcggagggggaagcggtggaggagggtcaggaggtggaggttcctgcccttcatgtccagcccccgagttcctcggaggcccgtcggtctttctttttccccctaagcctaaagataccctgatgatcagccggacgcctgaggtgacttgtgtggtagtcgacgtgtcccaagaagatccggaagtccagtttaactggtatgtggatggagtggaggtccataatgccaagacaaagccaagggaggagcaattcaactcgaagtaccgcgtcgtgtccgtgctcacagtgcttcatcaagactggttgaacggaaaggagtacaaatgtaaggtatcaaacaagggtttgccctcgtccatcgagaaaaccatctcgaaagcgaaagggcaaccccgcgagccccaggtatatacgctcccgccttcaagagaagaaatgacgaaaaaccaagtgagcttgtggtgcctggtcaaggggttctatccctccgatatcgcggtagagtgggaaagcaatgggcagccggagaacaactataagacaacgcctcccgtgttggactcagatggatcgttcttcttgtactcaaagcttacggtggacaagtcacgctggcagcaagggaacgtgttttcgtgctcggtgatgcacgaggcgcttcacaatcactacactcagaaatcgcttagcttgtcaccaggaaaa

SEQ ID NO: 209 - protein, 474 aa, Artificial Sequence
  source: /note="Description of Artificial Sequence: Synthetic polypeptide"
EPKSCDKTHTCPSCPAPEFLGGPSVFLFPPKPKDTLMISRTPEVTCVVVDVSQEDPEVQFNWYVDGVEVHNAKTKPREEQFNSKYRVVSVLTVLHQDWLNGKEYKCKVSNKGLPSSIEKTISKAKGQPREPQVYTLPPSREEMTKNQVSLSCAVKGFYPSDIAVEWESNGQPENNYKTTPPVLDSDGSFFLVSKLTVDKSRWQQGNVFSCSVMHEALHNHYTQKSLSLSPGKGGGGSGGGGSGGGGSGGGGSCPSCPAPEFLGGPSVFLFPPKPKDTLMISRTPEVTCVVVDVSQEDPEVQFNWYVDGVEVHNAKTKPREEQFNSKYRVVSVLTVLHQDWLNGKEYKCKVSNKGLPSSIEKTISKAKGQPREPQVYTLPPSREEMTKNQVSLWCLVKGFYPSDIAVEWESNGQPENNYKTTPPVLDSDGSFFLYSKLTVDKSRWQQGNVFSCSVMHEALHNHYTQKSLSLSPGK

SEQ ID NO: 210 - DNA, 1476 bp, Artificial Sequence
  source: /note="Description of Artificial Sequence: Synthetic polynucleotide"
gaaccgaaatcatgcgacaaaacgcacacctgtccgtcatgtcctgccccggaattccttggagggccttccgtgtttctcttccctccgaagcccaaggacacgctgatgatctcccggaccccggaggtcacgtgtgtggtagtagacgtgtcacaagaagatccggaggtgcagttcaactggtacgtagatggcgtggaggtgcacaacgccaaaacgaagccccgagaggaacagttcaattcgaagtaccgcgtcgtgtcggtattgactgtattgcatcaagactggttgaacgggaaggagtataagtgtaaagtcagcaacaagggacttccctcgtcaattgaaaagacaatttcgaaagccaaaggccagcccagggagccccaagtgtacaccctgccacccagccgggaagagatgacaaagaatcaagtctcgcttagctgcgctgtcaagggcttctatccatcggacattgcagtggaatgggaatcaaacggacagccggagaataactataagacgacaccccctgtcctcgacagcgacgggtcgttcttccttgtgagcaagctcacggtcgacaaaagccgctggcagcagggaaacgtattctcatgttcggtgatgcacgaagcattgcataaccactacacgcagaagagcttgtcgttgtcgaaaagctgcgacaagacgggagggggagggtccgggggtggtgggagcggcggaggaggtagcggcggaggtggctcgggaggaggtgggtcgggtggtgggggaagcggaggcggagggtcatgtccgagctgcccggcacccgaatttctcggaggtccctcggtgttcctgttcccgccaaagcctaaggatacgttgatgatttcgcgcacgccggaggtaacatgcgtggtggtggatgtgtcacaagaggaccccgaggtccagttcaattggtacgtcgatggagtggaagtgcacaatgcgaaaacaaaaccccgggaggagcagttcaatagcaagtacagggtagtctccgtcctgactgtacttcaccaagactggcttaacggaaaagagtataagtgcaaggtcagcaacaaggggcttccttcatccatcgagaaaaccatctcgaaggccaagggacagccgagggagcctcaagtatacacgctgccgccatcgagagaagaaatgaccaaaaaccaggtgtccctttggtgtttggtgaagggtttctatccctccgatatcgccgtagagtgggagtcaaatggacagcctgagaacaactataagactacgccccctgtgttggacagcgatgggtcattctttctgtattcgaaactcacggtggataagtcgcgatggcaacagggcaatgtgttttcgtgcagcgtgatgcatgaggcgctgcacaaccactatactcagaaatcgttaagcttatcgggagagtgt

SEQ ID NO: 211 - protein, 492 aa, Artificial Sequence
  source: /note="Description of Artificial Sequence: Synthetic polypeptide"
EPKSCDKTHTCPSCPAPEFLGGPSVFLFPPKPKDTLMISRTPEVTCVVVDVSQEDPEVQFNWYVDGVEVHNAKTKPREEQFNSKYRVVSVLTVLHQDWLNGKEYKCKVSNKGLPSSIEKTISKAKGQPREPQVYTLPPSREEMTKNQVSLSCAVKGFYPSDIAVEWESNGQPENNYKTTPPVLDSDGSFFLVSKLTVDKSRWQQGNVFSCSVMHEALHNHYTQKSLSLSKSCDKTGGGGSGGGGSGGGGSGGGGSGGGGSGGGGSGGGGSCPSCPAPEFLGGPSVFLFPPKPKDTLMISRTPEVTCVVVDVSQEDPEVQFNWYVDGVEVHNAKTKPREEQFNSKYRVVSVLTVLHQDWLNGKEYKCKVSNKGLPSSIEKTISKAKGQPREPQVYTLPPSREEMTKNQVSLWCLVKGFYPSDIAVEWESNGQPENNYKTTPPVLDSDGSFFLYSKLTVDKSRWQQGNVFSCSVMHEALHNHYTQKSLSLSGEC

SEQ ID NO: 212 - DNA, 1476 bp, Artificial Sequence
  source: /note="Description of Artificial Sequence: Synthetic polynucleotide"
gaaccgaaatcatgcgacaaaacgcacacctgtccgtcatgtcctgccccggaattccttggagggccttccgtgtttctcttccctccgaagcccaaggacacgctgatgatctcccggaccccggaggtcacgtgtgtggtagtagacgtgtcacaagaagatccggaggtgcagttcaactggtacgtagatggcgtggaggtgcacaacgccaaaacgaagccccgagaggaacagttcaattcgaagtaccgcgtcgtgtcggtattgactgtattgcatcaagactggttgaacgggaaggagtataagtgtaaagtcagcaacaagggacttccctcgtcaattgaaaagacaatttcgaaagccaaaggccagcccagggagccccaagtgtacaccctgccacccagccgggaagagatgacaaagaatcaagtctcgcttagctgcgctgtcaagggcttctatccatcggacattgcagtggaatgggaatcaaacggacagccggagaataactataagacgacaccccctgtcctcgacagcgacgggtcgttcttccttgtgagcaagctcacggtcgacaaaagccgctggcagcagggaaacgtattctcatgttcggtgatgcacgaagcattgcataaccactacacgcagaagagcttgtcgttgtcgggggaatgcggagggggagggtccggagggggagggtccgggggtggtgggagcggcggaggaggtagcggcggaggtggctcgggaggaggtgggtcgggtggtgggggatcatgtccgagctgcccggcacccgaatttctcggaggtccctcggtgttcctgttcccgccaaagcctaaggatacgttgatgatttcgcgcacgccggaggtaacatgcgtggtggtggatgtgtcacaagaggaccccgaggtccagttcaattggtacgtcgatggagtggaagtgcacaatgcgaaaacaaaaccccgggaggagcagttcaatagcaagtacagggtagtctccgtcctgactgtacttcaccaagactggcttaacggaaaagagtataagtgcaaggtcagcaacaaggggcttccttcatccatcgagaaaaccatctcgaaggccaagggacagccgagggagcctcaagtatacacgctgccgccatcgagagaagaaatgaccaaaaaccaggtgtccctttggtgtttggtgaagggtttctatccctccgatatcgccgtagagtgggagtcaaatggacagcctgagaacaactataagactacgccccctgtgttggacagcgatgggtcattctttctgtattcgaaactcacggtggataagtcgcgatggcaacagggcaatgtgttttcgtgcagcgtgatgcatgaggcgctgcacaaccactatactcagaaatcgttaagcttatcgaagtcatgcgacaagact

SEQ ID NO: 213 - protein, 492 aa, Artificial Sequence
  source: /note="Description of Artificial Sequence: Synthetic polypeptide"
EPKSCDKTHTCPSCPAPEFLGGPSVFLFPPKPKDTLMISRTPEVTCVVVDVSQEDPEVQFNWYVDGVEVHNAKTKPREEQFNSKYRVVSVLTVLHQDWLNGKEYKCKVSNKGLPSSIEKTISKAKGQPREPQVYTLPPSREEMTKNQVSLSCAVKGFYPSDIAVEWESNGQPENNYKTTPPVLDSDGSFFLVSKLTVDKSRWQQGNVFSCSVMHEALHNHYTQKSLSLSGECGGGGSGGGGSGGGGSGGGGSGGGGSGGGGSGGGGSCPSCPAPEFLGGPSVFLFPPKPKDTLMISRTPEVTCVVVDVSQEDPEVQFNWYVDGVEVHNAKTKPREEQFNSKYRVVSVLTVLHQDWLNGKEYKCKVSNKGLPSSIEKTISKAKGQPREPQVYTLPPSREEMTKNQVSLWCLVKGFYPSDIAVEWESNGQPENNYKTTPPVLDSDGSFFLYSKLTVDKSRWQQGNVFSCSVMHEALHNHYTQKSLSLSKSCDKT

SEQ ID NO: 214 - DNA, 1461 bp, Artificial Sequence
  source: /note="Description of Artificial Sequence: Synthetic polynucleotide"
gaaccgaaatcatgcgacaaaacgcacacctgtccgtcatgtcctgccccggaattccttggagggccttccgtgtttctcttccctccgaagcccaaggacacgctgatgatctcccggaccccggaggtcacgtgtgtggtagtagacgtgtcacaagaagatccggaggtgcagttcaactggtacgtagatggcgtggaggtgcacaacgccaaaacgaagccccgagaggaacagttcaattcgaagtaccgcgtcgtgtcggtattgactgtattgcatcaagactggttgaacgggaaggagtataagtgtaaagtcagcaacaagggacttccctcgtcaattgaaaagacaatttcgaaagccaaaggccagcccagggagccccaagtgtacaccctgccacccagccgggaagagatgacaaagaatcaagtctcgcttagctgcgctgtcaagggcttctatccatcggacattgcagtggaatgggaatcaaacggacagccggagaataactataagacgacaccccctgtcctcgacagcgacgggtcgttcttccttgtgagcaagctcacggtcgacaaaagccgctggcagcagggaaacgtattctcatgttcggtgatgcacgaagcattgcataaccactacacgcagaagagcttgtcgttgtcgaaaagctgcgacaagacgggagggggagggtccgggggtggtgggagcggcggaggaggtagcggcggaggtggctcgggaggaggtgggtcgggtggtgggggatcatgtccgagctgcccggcacccgaatttctcggaggtccctcggtgttcctgttcccgccaaagcctaaggatacgttgatgatttcgcgcacgccggaggtaacatgcgtggtggtggatgtgtcacaagaggaccccgaggtccagttcaattggtacgtcgatggagtggaagtgcacaatgcgaaaacaaaaccccgggaggagcagttcaatagcaagtacagggtagtctccgtcctgactgtacttcaccaagactggcttaacggaaaagagtataagtgcaaggtcagcaacaaggggcttccttcatccatcgagaaaaccatctcgaaggccaagggacagccgagggagcctcaagtatacacgctgccgccatcgagagaagaaatgaccaaaaaccaggtgtccctttggtgtttggtgaagggtttctatccctccgatatcgccgtagagtgggagtcaaatggacagcctgagaacaactataagactacgccccctgtgttggacagcgatgggtcattctttctgtattcgaaactcacggtggataagtcgcgatggcaacagggcaatgtgttttcgtgcagcgtgatgcatgaggcgctgcacaaccactatactcagaaatcgttaagcttatcgggagagtgt

SEQ ID NO: 215 - protein, 487 aa, Artificial Sequence
  source: /note="Description of Artificial Sequence: Synthetic polypeptide"
EPKSCDKTHTCPSCPAPEFLGGPSVFLFPPKPKDTLMISRTPEVTCVVVDVSQEDPEVQFNWYVDGVEVHNAKTKPREEQFNSKYRVVSVLTVLHQDWLNGKEYKCKVSNKGLPSSIEKTISKAKGQPREPQVYTLPPSREEMTKNQVSLSCAVKGFYPSDIAVEWESNGQPENNYKTTPPVLDSDGSFFLVSKLTVDKSRWQQGNVFSCSVMHEALHNHYTQKSLSLSKSCDKTGGGGSGGGGSGGGGSGGGGSGGGGSGGGGSCPSCPAPEFLGGPSVFLFPPKPKDTLMISRTPEVTCVVVDVSQEDPEVQFNWYVDGVEVHNAKTKPREEQFNSKYRVVSVLTVLHQDWLNGKEYKCKVSNKGLPSSIEKTISKAKGQPREPQVYTLPPSREEMTKNQVSLWCLVKGFYPSDIAVEWESNGQPENNYKTTPPVLDSDGSFFLYSKLTVDKSRWQQGNVFSCSVMHEALHNHYTQKSLSLSGEC

SEQ ID NO: 216 - DNA, 1446 bp, Artificial Sequence
  source: /note="Description of Artificial Sequence: Synthetic polynucleotide"
gaaccgaaatcatgcgacaaaacgcacacctgtccgtcatgtcctgccccggaattccttggagggccttccgtgtttctcttccctccgaagcccaaggacacgctgatgatctcccggaccccggaggtcacgtgtgtggtagtagacgtgtcacaagaagatccggaggtgcagttcaactggtacgtagatggcgtggaggtgcacaacgccaaaacgaagccccgagaggaacagttcaattcgaagtaccgcgtcgtgtcggtattgactgtattgcatcaagactggttgaacgggaaggagtataagtgtaaagtcagcaacaagggacttccctcgtcaattgaaaagacaatttcgaaagccaaaggccagcccagggagccccaagtgtacaccctgccacccagccgggaagagatgacaaagaatcaagtctcgcttagctgcgctgtcaagggcttctatccatcggacattgcagtggaatgggaatcaaacggacagccggagaataactataagacgacaccccctgtcctcgacagcgacgggtcgttcttccttgtgagcaagctcacggtcgacaaaagccgctggcagcagggaaacgtattctcatgttcggtgatgcacgaagcattgcataaccactacacgcagaagagcttgtcgttgtcgaaaagctgcgacaagacgggagggggagggtccgggggtggtgggagcggcggaggaggtagcggcggaggtggctcgggaggaggtgggtcatgtccgagctgcccggcacccgaatttctcggaggtccctcggtgttcctgttcccgccaaagcctaaggatacgttgatgatttcgcgcacgccggaggtaacatgcgtggtggtggatgtgtcacaagaggaccccgaggtccagttcaattggtacgtcgatggagtggaagtgcacaatgcgaaaacaaaaccccgggaggagcagttcaatagcaagtacagggtagtctccgtcctgactgtacttcaccaagactggcttaacggaaaagagtataagtgcaaggtcagcaacaaggggcttccttcatccatcgagaaaaccatctcgaaggccaagggacagccgagggagcctcaagtatacacgctgccgccatcgagagaagaaatgaccaaaaaccaggtgtccctttggtgtttggtgaagggtttctatccctccgatatcgccgtagagtgggagtcaaatggacagcctgagaacaactataagactacgccccctgtgttggacagcgatgggtcattctttctgtattcgaaactcacggtggataagtcgcgatggcaacagggcaatgtgttttcgtgcagcgtgatgcatgaggcgctgcacaaccactatactcagaaatcgttaagcttatcgggagagtgt

SEQ ID NO: 217 - protein, 482 aa, Artificial Sequence
  source: /note="Description of Artificial Sequence: Synthetic polypeptide"
EPKSCDKTHTCPSCPAPEFLGGPSVFLFPPKPKDTLMISRTPEVTCVVVDVSQEDPEVQFNWYVDGVEVHNAKTKPREEQFNSKYRVVSVLTVLHQDWLNGKEYKCKVSNKGLPSSIEKTISKAKGQPREPQVYTLPPSREEMTKNQVSLSCAVKGFYPSDIAVEWESNGQPENNYKTTPPVLDSDGSFFLVSKLTVDKSRWQQGNVFSCSVMHEALHNHYTQKSLSLSKSCDKTGGGGSGGGGSGGGGSGGGGSGGGGSCPSCPAPEFLGGPSVFLFPPKPKDTLMISRTPEVTCVVVDVSQEDPEVQFNWYVDGVEVHNAKTKPREEQFNSKYRVVSVLTVLHQDWLNGKEYKCKVSNKGLPSSIEKTISKAKGQPREPQVYTLPPSREEMTKNQVSLWCLVKGFYPSDIAVEWESNGQPENNYKTTPPVLDSDGSFFLYSKLTVDKSRWQQGNVFSCSVMHEALHNHYTQKSLSLSGEC

SEQ ID NO: 218 - DNA, 1491 bp, Artificial Sequence
  source: /note="Description of Artificial Sequence: Synthetic polynucleotide"
gaaccgaaatcatgcgacaaaacgcacacttgtccttcctgccctgccccggagttccttggcggaccctcggtctttttgtttccgccgaaaccgaaagacacccttatgattagcaggacacccgaagtcacgtgtgtcgtcgtggacgtgtcgcaagaggatcccgaggtgcagttcaactggtacgtggacggggtagaagtccacaatgccaagacaaaaccccgggaagaacagtttaactcgaagtaccgcgtagtgtcagtcttgacagtcctccatcaggactggcttaacgggaaggagtacaaatgtaaagtgtcaaacaagggtctgccttccagcattgagaaaacgatctccaaggctaaagggcagccccgagaaccacaagtctatacgcttccaccatcgcgggaggagatgaccaagaaccaggtccacttgacctgtctcgtgaaggggttctacccgtcagatatcgcggtagagtgggaatcgaacggccagcccgagaataactacaagacgactcctccggtcctcgattcagatgggtcgttcgcactctactcaaaacttacggtggacaagtcgagatggcagcagggcaacgtgtttagctgctcagtcatgcacgaggcgctgcataatcactatacacagaagtcgctgtcattgtcaaaaagctgcgacaagacagggggtggaggttcaggcggtggtgggtcgggagggggagggtcaggtggaggcggcagcgggggtgggggatcgggaggaggagggtccgggggagggggttccggagggggtgggtcctgtccgtcgtgccctgcaccggaattcttgggcggtccgtcagtgttcctgtttcccccgaaacccaaagatacgctcatgatttcccgcacccctgaggtcacttgcgtggtagtcgatgtcagccaggaagatcccgaagtacagttcaattggtacgtagatggtgtagaagtacacaacgctaaaactaagcctcgcgaagagcagttcaattcgaagtatcgggtagtaagcgtgctgactgtgctccatcaagactggctgaatggaaaagagtataagtgcaaagtctcgaataagggattgcccagctccatcgagaaaaccatctcgaaagcgaagggacagcccagagaaccccaagtgaccacattgccaccctcccgagaggaaatgactaagaatcaagtgtcactcacatgtcttgtgaagggattctatcccagcgacatcgccgtcgagtgggagtccaatgggcagccggaaaacaattacaaaacgtttccacccgtccttgactcagatggatcgttctttctctattcgaagctcacggtagataagtcgaggtggcaacaaggaaatgtgttttcatgttcggtgatgcatgaagcgctccataaccactatacgcagaaatcgctttcgctctccggtgaatgc

SEQ ID NO: 219 - protein, 497 aa, Artificial Sequence
  source: /note="Description of Artificial Sequence: Synthetic polypeptide"
EPKSCDKTHTCPSCPAPEFLGGPSVFLFPPKPKDTLMISRTPEVTCVVVDVSQEDPEVQFNWYVDGVEVHNAKTKPREEQFNSKYRVVSVLTVLHQDWLNGKEYKCKVSNKGLPSSIEKTISKAKGQPREPQVYTLPPSREEMTKNQVHLTCLVKGFYPSDIAVEWESNGQPENNYKTTPPVLDSDGSFALYSKLTVDKSRWQQGNVFSCSVMHEALHNHYTQKSLSLSKSCDKTGGGGSGGGGSGGGGSGGGGSGGGGSGGGGSGGGGSGGGGSCPSCPAPEFLGGPSVFLFPPKPKDTLMISRTPEVTCVVVDVSQEDPEVQFNWYVDGVEVHNAKTKPREEQFNSKYRVVSVLTVLHQDWLNGKEYKCKVSNKGLPSSIEKTISKAKGQPREPQVTTLPPSREEMTKNQVSLTCLVKGFYPSDIAVEWESNGQPENNYKTFPPVLDSDGSFFLYSKLTVDKSRWQQGNVFSCSVMHEALHNHYTQKSLSLSGEC

SEQ ID NO: 220 - DNA, 1491 bp, Artificial Sequence
  source: /note="Description of Artificial Sequence: Synthetic polynucleotide"
gaaccgaaatcatgcgacaaaacgcacacttgtccttcctgccctgccccggagttccttggcggaccctcggtctttttgtttccgccgaaaccgaaagacacccttatgattagcaggacacccgaagtcacgtgtgtcgtcgtggacgtgtcgcaagaggatcccgaggtgcagttcaactggtacgtggacggggtagaagtccacaatgccaagacaaaaccccgggaagaacagtttaactcgaagtaccgcgtagtgtcagtcttgacagtcctccatcaggactggcttaacgggaaggagtacaaatgtaaagtgtcaaacaagggtctgccttccagcattgagaaaacgatctccaaggctaaaggacagccaagagagcctcaagtctatacattgcccccgagccgggaggaaatgaccaaaaaccaggtatcgcttacgtgcttggtggacgggttttacccttcagacatcgcagtggagtgggaatccaacgggcagccagagaacaattacgataccactccacccgtgcttgacagcgatggctcattcttcctctattccgacttgaccgtcgataagtcacgatggcagcaggggaatgtgtttagctgttcggtcatgcacgaagcgctgcacaaccactacacgcagaagtcgctctcattgtccaaaagctgcgacaagacagggggtggaggttcaggcggtggtgggtcgggagggggagggtcaggtggaggcggcagcgggggtgggggatcgggaggaggagggtccgggggagggggttccggagggggtgggtcctgtccgtcgtgccctgcaccggaattcttgggcggtccgtcagtgttcctgtttcccccgaaacccaaagatacgctcatgatttcccgcacccctgaggtcacttgcgtggtagtcgatgtcagccaggaagatcccgaagtacagttcaattggtacgtagatggtgtagaagtacacaacgctaaaactaagcctcgcgaagagcagttcaattcgaagtatcgggtagtaagcgtgctgactgtgctccatcaagactggctgaatggaaaagagtataagtgcaaagtctcgaataagggattgcccagctccatcgagaaaaccatctcgaaagcgaagggacagcccagagaaccccaagtgtatacgcttcccccttcaagaaagaagatgactaagaatcaggtgtcactcacgtgcctcgtgaagggattctatccgtcggacatcgcggtcgaatgggagtcgaatggacagccggagaacaactacaagacaacacctccagtgctgaaatcggatgggagcttctttctgtattcgaagctcacggtagataagtcgaggtggcaacaaggaaatgtgttttcatgttcggtgatgcatgaagcgctccataaccactatacgcagaaatcgctttcgctctccggtgaatgc

SEQ ID NO: 221 - protein, 497 aa, Artificial Sequence
  source: /note="Description of Artificial Sequence: Synthetic polypeptide"
EPKSCDKTHTCPSCPAPEFLGGPSVFLFPPKPKDTLMISRTPEVTCVVVDVSQEDPEVQFNWYVDGVEVHNAKTKPREEQFNSKYRVVSVLTVLHQDWLNGKEYKCKVSNKGLPSSIEKTISKAKGQPREPQVYTLPPSREEMTKNQVSLTCLVDGFYPSDIAVEWESNGQPENNYDTTPPVLDSDGSFFLYSDLTVDKSRWQQGNVFSCSVMHEALHNHYTQKSLSLSKSCDKTGGGGSGGGGSGGGGSGGGGSGGGGSGGGGSGGGGSGGGGSCPSCPAPEFLGGPSVFLFPPKPKDTLMISRTPEVTCVVVDVSQEDPEVQFNWYVDGVEVHNAKTKPREEQFNSKYRVVSVLTVLHQDWLNGKEYKCKVSNKGLPSSIEKTISKAKGQPREPQVYTLPPSRKKMTKNQVSLTCLVKGFYPSDIAVEWESNGQPENNYKTTPPVLKSDGSFFLYSKLTVDKSRWQQGNVFSCSVMHEALHNHYTQKSLSLSGEC

SEQ ID NO: 222 - DNA, 651 bp, Artificial Sequence
  source: /note="Description of Artificial Sequence: Synthetic polynucleotide"
gaggtgcaactggtagaaagcggaggtggtcttgtacagcccggtggttcactcagactgtcgtgcgcagcttcagggtatacgttcacctcctactggctccattgggtgcgacaggctccggggaaaggactggaatgggtcgggatgattgatccgtcgaattcggatactaggttcaatcccaacttcaaggaccggtttaccattagcgcggatacctcgaaaaacaccgcatatctccaaatgaactcgttgagagccgaggacacggcggtgtattactgcgcaagatacgggtcgtatgtgtcaccgttggactactggggccaggggacactggtaacggtcagctcagctagcacgaagggacctagcgtgttcccattggcgcccagctcgaaatccacatcgggcggaacggcagcccttgggtgcctcgtgaaagactactttcccgaaccggtgactgtgtcgtggaattcaggggcattgacttccggtgtccacacatttccagccgtgctgcagtccagcgggttgtattcgctctcgtcagtggtcacagtcccatcctcctcgctcggaacacaaacctatatctgtaatgtcaaccataaaccttcaaatacaaaagtggacaaaaaggta

SEQ ID NO: 223 - protein, 217 aa, Artificial Sequence
  source: /note="Description of Artificial Sequence: Synthetic polypeptide"
EVQLVESGGGLVQPGGSLRLSCAASGYTFTSYWLHWVRQAPGKGLEWVGMIDPSNSDTRFNPNFKDRFTISADTSKNTAYLQMNSLRAEDTAVYYCARYGSYVSPLDYWGQGTLVTVSSASTKGPSVFPLAPSSKSTSGGTAALGCLVKDYFPEPVTVSWNSGALTSGVHTFPAVLQSSGLYSLSSVVTVPSSSLGTQTYICNVNHKPSNTKVDKKV

SEQ ID NO: 224 - DNA, 2913 bp, Artificial Sequence
  source: /note="Description of Artificial Sequence: Synthetic polynucleotide"
gaggtgcaactggtagaaagcggaggtggtcttgtacagcccggtggttcactcagactgtcgtgcgcagcttcagggtatacgttcacctcctactggctccattgggtgcgacaggctccggggaaaggactggaatgggtcgggatgattgatccgtcgaattcggatactaggttcaatcccaacttcaaggaccggtttaccattagcgcggatacctcgaaaaacaccgcatatctccaaatgaactcgttgagagccgaggacacggcggtgtattactgcgcaagatacgggtcgtatgtgtcaccgttggactactggggccaggggacactggtaacggtcagctcagctagcacgaagggacctagcgtgttcccattggcgcccagctcgaaatccacatcgggcggaacggcagcccttgggtgcctcgtgaaagactactttcccgaaccggtgactgtgtcgtggaattcaggggcattgacttccggtgtccacacatttccagccgtgctgcagtccagcgggttgtattcgctctcgtcagtggtcacagtcccatcctcctcgctcggaacacaaacctatatctgtaatgtcaaccataaaccttcaaatacaaaagtggacaaaaaggtagaaccgaaatcatgcgataagacccacacatgccctccctgtccagcacccgagctgctcgggggaccctcggtgttcttgtttcctcccaaacccaaagatacccttatgattagccggacaccagaggtgacgtgcgtggtagtagacgtgtcccatgaggacccggaggtcaagttcaactggtacgtggacggagtggaggtgcacaatgcaaagaccaagccgagggaagagcaataccagtccacatatagagtcgtgtcggtccttacggtcttgcatcaggactggctgaatggcaaagaatacaaatgtaaagtctccaacaaagctctcccagcgcccattgagaaaacaatctcaaaagcgaaaggccaaccgagagaacctcaagtctatactcttcccccgtcgagagaggaaatgaccaaaaaccaggtatccctgtcatgcgcggtcaaggggttttacccaagcgacatcgccgtggagtgggagtcgaacggacagccagagaataactataagacgacccctcccgtgctggattcggatggatcgttctttcttgtcagcaaactcacagtcgacaaatcaaggtggcagcaagggaacgtgttcagctgttcggtaatgcatgaagccctccacaatcactacacgcagaaatccctgtcgctctcaccagggaagggtgggggtggctcagggggtgggggatcaggtggtggtggtagcggaggtggagggagcggaggcggaggctccggtggaggaggttccggaggtggcgggtcagggggaggagggtcatgtccgccgtgccctgcccccgaattgctgggaggtccgtccgtatttctgtttcccccgaagcctaaagatactcttatgatctcgcgaacgccggaagtaacttgtgtcgtggtagatgtctcacacgaagatcccgaagtgaaattcaattggtatgtcgacggcgtggaggtacataacgccaagacgaagcctagagaggaacagtaccagtcaacgtatcgggtcgtatccgtgctcaccgtgctccaccaggattggctgaacggaaaggagtacaagtgcaaagtctcgaacaaggcgttgcctgcgccaatcgaaaagacgatctccaaagctaagggacaaccaagggaaccacaagtgtatactctcccgccctcgcgcgaagagatgacaaagaatcaggtgtcactttggtgcttggtgaaggggttctatccctcggatattgcggtcgagtgggagagcaatggtcaaccggagaacaattacaagacgacaccgcccgtattggactccgacgggtccttctttctctactcgaagctcactgtagataagtcgcgatggcagcaggggaacgtctttagctgttccgtgatgcacgaggcacttcataaccactatacccagaagtcgttgtcgctttcccccggaaaaggaggtggagggagcggtggtgggggatcccaagtccagttgcaagaaagcgggccaggactcgtgaaaccctcggaaaccctgtcactgacgtgcacggtgagcggagggtccgtgtcgagcggagattactattggacttggattagacagtcgcccggaaaaggtctggagtggatcggacacatctactactcggggaatacgaattacaacccgtcgttgaaatcacggctcacgattagcatcgatacctccaagacgcagttctcgctcaaacttagctccgtaactgcggccgacaccgcaatctactattgtgtacgcgaccgcgtcacaggggcttttgacatttggggtcagggcactatggtgacctcgtcagcgtcgacaggtggtgggggatcaggaggaggtggctccgggggaggcggaagcggcggtgggggctccgacatccagatgacgcagtcgccctcatcattgtcagcatcagtcggggacagggtcactattacttgtcaggccagccaagatatctcgaactatctgaactggtatcagcagaagcctggaaaagcgcctaagctccttatctatgatgcgtccaatcttgagacaggggtgccgtcgcggttttccggttcagggtcgggaacggacttcacgtttacaatctccagcctgcagccggaggacgaagccacctacttctgccaacacttcgaccatttgcctcttgcgttcggaggtgggacaaaggtggagatcaagcgaact

SEQ ID NO: 225 - protein, 971 aa, Artificial Sequence
  source: /note="Description of Artificial Sequence: Synthetic polypeptide"
EVQLVESGGGLVQPGGSLRLSCAASGYTFTSYWLHWVRQAPGKGLEWVGMIDPSNSDTRFNPNFKDRFTISADTSKNTAYLQMNSLRAEDTAVYYCARYGSYVSPLDYWGQGTLVTVSSASTKGPSVFPLAPSSKSTSGGTAALGCLVKDYFPEPVTVSWNSGALTSGVHTFPAVLQSSGLYSLSSVVTVPSSSLGTQTYICNVNHKPSNTKVDKKVEPKSCDKTHTCPPCPAPELLGGPSVFLFPPKPKDTLMISRTPEVTCVVVDVSHEDPEVKFNWYVDGVEVHNAKTKPREEQYQSTYRVVSVLTVLHQDWLNGKEYKCKVSNKALPAPIEKTISKAKGQPREPQVYTLPPSREEMTKNQVSLSCAVKGFYPSDIAVEWESNGQPENNYKTTPPVLDSDGSFFLVSKLTVDKSRWQQGNVFSCSVMHEALHNHYTQKSLSLSPGKGGGGSGGGGSGGGGSGGGGSGGGGSGGGGSGGGGSGGGGSCPPCPAPELLGGPSVFLFPPKPKDTLMISRTPEVTCVVVDVSHEDPEVKFNWYVDGVEVHNAKTKPREEQYQSTYRVVSVLTVLHQDWLNGKEYKCKVSNKALPAPIEKTISKAKGQPREPQVYTLPPSREEMTKNQVSLWCLVKGFYPSDIAVEWESNGQPENNYKTTPPVLDSDGSFFLYSKLTVDKSRWQQGNVFSCSVMHEALHNHYTQKSLSLSPGKGGGGSGGGGSQVQLQESGPGLVKPSETLSLTCTVSGGSVSSGDYYWTWIRQSPGKGLEWIGHIYYSGNTNYNPSLKSRLTISIDTSKTQFSLKLSSVTAADTAIYYCVRDRVTGAFDIWGQGTMVTSSASTGGGGSGGGGSGGGGSGGGGSDIQMTQSPSSLSASVGDRVTITCQASQDISNYLNWYQQKPGKAPKLLIYDASNLETGVPSRFSGSGSGTDFTFTISSLQPEDEATYFCQHFDHLPLAFGGGTKVEIKRT

SEQ ID NO: 226 - DNA, 2913 bp, Artificial Sequence
  source: /note="Description of Artificial Sequence: Synthetic polynucleotide"
gaggtgcaactggtagaaagcggaggtggtcttgtacagcccggtggttcactcagactgtcgtgcgcagcttcagggtatacgttcacctcctactggctccattgggtgcgacaggctccggggaaaggactggaatgggtcgggatgattgatccgtcgaattcggatactaggttcaatcccaacttcaaggaccggtttaccattagcgcggatacctcgaaaaacaccgcatatctccaaatgaactcgttgagagccgaggacacggcggtgtattactgcgcaagatacgggtcgtatgtgtcaccgttggactactggggccaggggacactggtaacggtcagctcagctagcacgaagggacctagcgtgttcccattggcgcccagctcgaaatccacatcgggcggaacggcagcccttgggtgcctcgtgaaagactactttcccgaaccggtgactgtgtcgtggaattcaggggcattgacttccggtgtccacacatttccagccgtgctgcagtccagcgggttgtattcgctctcgtcagtggtcacagtcccatcctcctcgctcggaacacaaacctatatctgtaatgtcaaccataaaccttcaaatacaaaagtggacaaaaaggtagaaccgaaatcatgcgacaagacccatacatgcccaagctgtcccgctccggagtttctcggtggaccgtcggtgtttctgttccctccgaagccaaaagataccttgatgatttcgcgaactcccgaagtcacgtgtgtcgtcgtggacgtaagccaggaggacccggaggtccagttcaattggtatgtagacggcgtagaggtacataatgcgaaaacgaagcccagagaggaacagttcaatagcaaataccgcgtagtatcggtgctgacagtgttgcaccaggactggctgaatggaaaagaatacaagtgtaaagtgtccaacaagggccttccatcgtcgattgaaaagacaatctccaaggcaaaggggcagcctagggagccccaagtctacaccctgcccccttcgcgggaggagatgacgaagaaccaggtatcactgtcatgcgcggtcaaaggattttacccgagcgacatcgccgtagaatgggagtccaacggacagccagaaaacaattacaagaccactcctccagtgctcgatagcgatggctccttctttcttgtcagcaaattgacagtcgataagtcaagatggcagcagggtaatgtgttctcatgtagcgtcatgcacgaagcactccacaatcattatacacagaagagcctctcgttgtcgcccggaaaaggcggaggtgggtcgggcggagggggaagcggtggaggagggtcaggaggtggaggttccgggggaggcggttcgggaggagggggttcgggtggtggaggatcgggtggcggaggaagctgcccttcatgtccagcccccgagttcctcggaggcccgtcggtctttctttttccccctaagcctaaagataccctgatgatcagccggacgcctgaggtgacttgtgtggtagtcgacgtgtcccaagaagatccggaagtccagtttaactggtatgtggatggagtggaggtccataatgccaagacaaagccaagggaggagcaattcaactcgaagtaccgcgtcgtgtccgtgctcacagtgcttcatcaagactggttgaacggaaaggagtacaaatgtaaggtatcaaacaagggtttgccctcgtccatcgagaaaaccatctcgaaagcgaaagggcaaccccgcgagccccaggtatatacgctcccgccttcaagagaagaaatgacgaaaaaccaagtgagcttgtggtgcctggtcaaggggttctatccctccgatatcgcggtagagtgggaaagcaatgggcagccggagaacaactataagacaacgcctcccgtgttggactcagatggatcgttcttcttgtactcaaagcttacggtggacaagtcacgctggcagcaagggaacgtgttttcgtgctcggtgatgcacgaggcgcttcacaatcactacactcagaaatcgcttagcttgtcaccaggaaaaggaggtggagggagcggtggtgggggatcccaagtccagttgcaagaaagcgggccaggactcgtgaaaccctcggaaaccctgtcactgacgtgcacggtgagcggagggtccgtgtcgagcggagattactattggacttggattagacagtcgcccggaaaaggtctggagtggatcggacacatctactactcggggaatacgaattacaacccgtcgttgaaatcacggctcacgattagcatcgatacctccaagacgcagttctcgctcaaacttagctccgtaactgcggccgacaccgcaatctactattgtgtacgcgaccgcgtcacaggggcttttgacatttggggtcagggcactatggtgacctcgtcagcgtcgacaggtggtgggggatcaggaggaggtggctccgggggaggcggaagcggcggtgggggctccgacatccagatgacgcagtcgccctcatcattgtcagcatcagtcggggacagggtcactattacttgtcaggccagccaagatatctcgaactatctgaactggtatcagcagaagcctggaaaagcgcctaagctccttatctatgatgcgtccaatcttgagacaggggtgccgtcgcggttttccggttcagggtcgggaacggacttcacgtttacaatctccagcctgcagccggaggacgaagccacctacttctgccaacacttcgaccatttgcctcttgcgttcggaggtgggacaaaggtggagatcaagcgaact

SEQ ID NO: 227 - protein, 971 aa, Artificial Sequence
  source: /note="Description of Artificial Sequence: Synthetic polypeptide"
EVQLVESGGGLVQPGGSLRLSCAASGYTFTSYWLHWVRQAPGKGLEWVGMIDPSNSDTRFNPNFKDRFTISADTSKNTAYLQMNSLRAEDTAVYYCARYGSYVSPLDYWGQGTLVTVSSASTKGPSVFPLAPSSKSTSGGTAALGCLVKDYFPEPVTVSWNSGALTSGVHTFPAVLQSSGLYSLSSVVTVPSSSLGTQTYICNVNHKPSNTKVDKKVEPKSCDKTHTCPSCPAPEFLGGPSVFLFPPKPKDTLMISRTPEVTCVVVDVSQEDPEVQFNWYVDGVEVHNAKTKPREEQFNSKYRVVSVLTVLHQDWLNGKEYKCKVSNKGLPSSIEKTISKAKGQPREPQVYTLPPSREEMTKNQVSLSCAVKGFYPSDIAVEWESNGQPENNYKTTPPVLDSDGSFFLVSKLTVDKSRWQQGNVFSCSVMHEALHNHYTQKSLSLSPGKGGGGSGGGGSGGGGSGGGGSGGGGSGGGGSGGGGSGGGGSCPSCPAPEFLGGPSVFLFPPKPKDTLMISRTPEVTCVVVDVSQEDPEVQFNWYVDGVEVHNAKTKPREEQFNSKYRVVSVLTVLHQDWLNGKEYKCKVSNKGLPSSIEKTISKAKGQPREPQVYTLPPSREEMTKNQVSLWCLVKGFYPSDIAVEWESNGQPENNYKTTPPVLDSDGSFFLYSKLTVDKSRWQQGNVFSCSVMHEALHNHYTQKSLSLSPGKGGGGSGGGGSQVQLQESGPGLVKPSETLSLTCTVSGGSVSSGDYYWTWIRQSPGKGLEWIGHIYYSGNTNYNPSLKSRLTISIDTSKTQFSLKLSSVTAADTAIYYCVRDRVTGAFDIWGQGTMVTSSASTGGGGSGGGGSGGGGSGGGGSDIQMTQSPSSLSASVGDRVTITCQASQDISNYLNWYQQKPGKAPKLLIYDASNLETGVPSRFSGSGSGTDFTFTISSLQPEDEATYFCQHFDHLPLAFGGGTKVEIKRT

SEQ ID NO: 228 - DNA, 2913 bp, Artificial Sequence; identical to SEQ ID NO: 226
  source: /note="Description of Artificial Sequence: Synthetic polynucleotide"

SEQ ID NO: 229 - protein, 971 aa, Artificial Sequence; identical to SEQ ID NO: 227
  source: /note="Description of Artificial Sequence: Synthetic polypeptide"

SEQ ID NO: 230 - DNA, 660 bp, Artificial Sequence
  source: /note="Description of Artificial Sequence: Synthetic polynucleotide"
gacattcagatgacacagtcgccgtcgtcgcttagcgcgtcagtgggagatagggtgacgattacgtgcaagtcatcccagtcgctgttgtatacatcgagccagaagaactacctcgcgtggtaccaacagaagccggggaaagcgcccaaactcctgatctattgggcctcgaccagagagtccggagtaccatcgcgcttctcaggcagcgggagcgggacggacttcacactgacgatctcctccttgcaacccgaagattttgctacgtattactgtcaacaatactatgcctacccctggacctttggccagggtactaaggtcgagatcaaacgtacggtggccgctccctccgtctttatctttcctccaagcgacgagcagctgaagtctggcaccgcaagtgtggtgtgtctgctgaacaatttctaccccagggaagccaaagtgcaatggaaagtggataacgctctgcagtcaggaaattcccaggagagcgtcacagaacaagactctaaagatagtacttattcactgtccagcaccctgacactgtctaaggccgattatgagaaacacaaggtgtatgcctgtgaagtcactcatcaggggctgagttcacctgtgaccaaatcctttaacagaggtgagtgc

SEQ ID NO: 231 - protein, 220 aa, Artificial Sequence
  source: /note="Description of Artificial Sequence: Synthetic polypeptide"
DIQMTQSPSSLSASVGDRVTITCKSSQSLLYTSSQKNYLAWYQQKPGKAPKLLIYWASTRESGVPSRFSGSGSGTDFTLTISSLQPEDFATYYCQQYYAYPWTFGQGTKVEIKRTVAAPSVFIFPPSDEQLKSGTASVVCLLNNFYPREAKVQWKVDNALQSGNSQESVTEQDSKDSTYSLSSTLTLSKADYEKHKVYACEVTHQGLSSPVTKSFNRGEC

SEQ ID NO: 232 - DNA, 750 bp, Artificial Sequence
  source: /note="Description of Artificial Sequence: Synthetic polynucleotide"
caagtccagttgcaagaaagcgggccaggactcgtgaaaccctcggaaaccctgtcactgacgtgcacggtgagcggagggtccgtgtcgagcggagattactattggacttggattagacagtcgcccggaaaaggtctggagtggatcggacacatctactactcggggaatacgaattacaacccgtcgttgaaatcacggctcacgattagcatcgatacctccaagacgcagttctcgctcaaacttagctccgtaactgcggccgacaccgcaatctactattgtgtacgcgaccgcgtcacaggggcttttgacatttggggtcagggcactatggtgacctcgtcagcgtcgacaggtggtgggggatcaggaggaggtggctccgggggaggcggaagcggcggtgggggctccgacatccagatgacgcagtcgccctcatcattgtcagcatcagtcggggacagggtcactattacttgtcaggccagccaagatatctcgaactatctgaactggtatcagcagaagcctggaaaagcgcctaagctccttatctatgatgcgtccaatcttgagacaggggtgccgtcgcggttttccggttcagggtcgggaacggacttcacgtttacaatctccagcctgcagccggaggacgaagccacctacttctgccaacacttcgaccatttgcctcttgcgttcggaggtgggacaaaggtggagatcaagcgaact

SEQ ID NO: 233 - protein, 250 aa, Artificial Sequence
  source: /note="Description of Artificial Sequence: Synthetic polypeptide"
QVQLQESGPGLVKPSETLSLTCTVSGGSVSSGDYYWTWIRQSPGKGLEWIGHIYYSGNTNYNPSLKSRLTISIDTSKTQFSLKLSSVTAADTAIYYCVRDRVTGAFDIWGQGTMVTSSASTGGGGSGGGGSGGGGSGGGGSDIQMTQSPSSLSASVGDRVTITCQASQDISNYLNWYQQKPGKAPKLLIYDASNLETGVPSRFSGSGSGTDFTFTISSLQPEDEATYFCQHFDHLPLAFGGGTKVEIKRT

SEQ ID NO: 234 - DNA, 2922 bp, Artificial Sequence
  source: /note="Description of Artificial Sequence: Synthetic polynucleotide"
gaggtgcaactggtagaaagcggaggtggtcttgtacagcccggtggttcactcagactgtcgtgcgcagcttcagggtatacgttcacctcctactggctccattgggtgcgacaggctccggggaaaggactggaatgggtcgggatgattgatccgtcgaattcggatactaggttcaatcccaacttcaaggaccggtttaccattagcgcggatacctcgaaaaacaccgcatatctccaaatgaactcgttgagagccgaggacacggcggtgtattactgcgcaagatacgggtcgtatgtgtcaccgttggactactggggccaggggacactggtaacggtcagctcagctagcacgaagggacctagcgtgttcccattggcgcccagctcgaaatccacatcgggcggaacggcagcccttgggtgcctcgtgaaagactactttcccgaaccggtgactgtgtcgtggaattcaggggcattgacttccggtgtccacacatttccagccgtgctgcagtccagcgggttgtattcgctctcgtcagtggtcacagtcccatcctcctcgctcggaacacaaacctatatctgtaatgtcaaccataaaccttcaaatacaaaagtggacaaaaaggtagaaccgaaatcatgcgataaaacacacacatgcccaccatgcccagcgcctgaacttttgggaggtccctcggtgtttttgtttcctcctaagcctaaggacaccctgatgatctcccgcactccggaagtgacgtgtgtcgtagtcgacgtcagccatgaggaccctgaggtgaaattcaactggtacgtagatggtgtggaggtgcataatgcaaaaactaagcctcgggaggaacaatatcaaagcacataccgggtcgtgtccgtgctcacggtacttcatcaggattggctcaacgggaaagaatacaaatgtaaggtgtccaacaaggctctcccggcaccgattgagaaaacgatcagcaaggccaaggggcagccccgagaaccccaagtatacacacttcccccgtccagggaggagatgaccaagaaccaggtgtcgctgtcgtgtgcggtcaaggggttttatcccagcgacatcgcggtagagtgggagtcgaacggccagcccgagaacaactacaagacaacaccgcctgtattggactcggacgggtcgtttttcctggtcagcaagctcacagtggataaaagccgctggcagcaggggaatgtattctcctgctccgtcatgcacgaggcgcttcacaaccattacacgcaaaaatccctgtccttgtccaagtcatgcgacaagacgggaggaggagggtcaggcggaggaggaagcgggggtggagggtccggtggtggtgggagcggaggtggagggagcggtggaggtggtagcgggggaggtggatcgggagggggtgggagctgtccgccatgtccagccccggaacttctcgggggaccgtcagtctttctttttccgccgaagcccaaggacaccttgatgattagccgcacgccggaggtcacgtgcgtagtagtggatgtatcccacgaggaccccgaggtcaaattcaattggtatgtcgacggagtggaagtacacaacgcaaagacaaagccgagagaagagcagtaccaatccacttatagggtagtctcggtcttgacagtactgcaccaggactggcttaatggaaaggaatacaagtgcaaagtctcaaacaaagccctccccgcacccatcgaaaagacaatctcgaaagcgaaaggacagcccagagagcctcaagtgtataccctgcccccgtcaagagaagagatgacgaagaaccaagtgtccctctggtgtctcgtgaaaggtttttaccccagcgatattgccgtcgaatgggaaagcaatggtcagcccgaaaacaattacaagactacgcctcccgtattggattcggatggttcgttcttcttgtactcaaagcttactgtcgataagtcgcggtggcagcaaggcaatgtgtttagctgttcggtaatgcatgaggcgctccacaatcactatacacagaagagcttgtccctcagcggggagtgcggaggtggagggagcggtggtgggggatcccaagtccagttgcaagaaagcgggccaggactcgtgaaaccctcggaaaccctgtcactgacgtgcacggtgagcggagggtccgtgtcgagcggagattactattggacttggattagacagtcgcccggaaaaggtctggagtggatcggacacatctactactcggggaatacgaattacaacccgtcgttgaaatcacggctcacgattagcatcgatacctccaagacgcagttctcgctcaaacttagctccgtaactgcggccgacaccgcaatctactattgtgtacgcgaccgcgtcacaggggcttttgacatttggggtcagggcactatggtgacctcgtcagcgtcgacaggtggtgggggatcaggaggaggtggctccgggggaggcggaagcggcggtgggggctccgacatccagatgacgcagtcgccctcatcattgtcagcatcagtcggggacagggtcactattacttgtcaggccagccaagatatctcgaactatctgaactggtatcagcagaagcctggaaaagcgcctaagctccttatctatgatgcgtccaatcttgagacaggggtgccgtcgcggttttccggttcagggtcgggaacggacttcacgtttacaatctccagcctgcagccggaggacgaagccacctacttctgccaacacttcgaccatttgcctcttgcgttcggaggtgggacaaaggtggagatcaagcgaact

SEQ ID NO: 235 - protein, 974 aa, Artificial Sequence
  source: /note="Description of Artificial Sequence: Synthetic polypeptide"
EVQLVESGGGLVQPGGSLRLSCAASGYTFTSYWLHWVRQAPGKGLEWVGMIDPSNSDTRFNPNFKDRFTISADTSKNTAYLQMNSLRAEDTAVYYCARYGSYVSPLDYWGQGTLVTVSSASTKGPSVFPLAPSSKSTSGGTAALGCLVKDYFPEPVTVSWNSGALTSGVHTFPAVLQSSGLYSLSSVVTVPSSSLGTQTYICNVNHKPSNTKVDKKVEPKSCDKTHTCPPCPAPELLGGPSVFLFPPKPKDTLMISRTPEVTCVVVDVSHEDPEVKFNWYVDGVEVHNAKTKPREEQYQSTYRVVSVLTVLHQDWLNGKEYKCKVSNKALPAPIEKTISKAKGQPREPQVYTLPPSREEMTKNQVSLSCAVKGFYPSDIAVEWESNGQPENNYKTTPPVLDSDGSFFLVSKLTVDKSRWQQGNVFSCSVMHEALHNHYTQKSLSLSKSCDKTGGGGSGGGGSGGGGSGGGGSGGGGSGGGGSGGGGSGGGGSCPPCPAPELLGGPSVFLFPPKPKDTLMISRTPEVTCVVVDVSHEDPEVKFNWYVDGVEVHNAKTKPREEQYQSTYRVVSVLTVLHQDWLNGKEYKCKVSNKALPAPIEKTISKAKGQPREPQVYTLPPSREEMTKNQVSLWCLVKGFYPSDIAVEWESNGQPENNYKTTPPVLDSDGSFFLYSKLTVDKSRWQQGNVFSCSVMHEALHNHYTQKSLSLSGECGGGGSGGGGSQVQLQESGPGLVKPSETLSLTCTVSGGSVSSGDYYWTWIRQSPGKGLEWIGHIYYSGNTNYNPSLKSRLTISIDTSKTQFSLKLSSVTAADTAIYYCVRDRVTGAFDIWGQGTMVTSSASTGGGGSGGGGSGGGGSGGGGSDIQMTQSPSSLSASVGDRVTITCQASQDISNYLNWYQQKPGKAPKLLIYDASNLETGVPSRFSGSGSGTDFTFTISSLQPEDEATYFCQHFDHLPLAFGGGTKVEIKRT

SEQ ID NO: 236 - DNA, 771 bp, Artificial Sequence
  source: /note="Description of Artificial Sequence: Synthetic polynucleotide"
gaggtgcaactggtccagtcaggggcggaggtcaagaagcccggaagctccgtaaaggtatcatgcaaggcctcgggtggaaccttctcctcgtacgccatcggttgggtgagacaagctcccgggcagggcctcgaatggatgggcggaatcattcccatctttggaatcgcgaactatgcgcagaaatttcagggtagagtaacgattacagcggatgaatcgacttcgtccgcatacatggagctttcgtcacttcggtcagaggacactgccgtgtattactgtgcgcgggaggaaggcccgtattgtagctcgacctcgtgctacgctgcctttgacatttgggggcagggaacacttgtcacagtatcgagcgcgtccacgggcggagggggaagcggaggtgggggatcgggagggggaggatcagggggagggggctcccagagcgtgttgacccaagatccagctgtgtccgtcgcactgggacagacggtcaaaatcacgtgccagggtgactcgcttcgctcgtacttcgcgtcatggtatcagcaaaaacctggtcaggcaccgacgttggtgatgtacgcaaggaatgatcgacctgccggggtcccggacaggttctcggggagcaagagcgggacatccgcgtcgttggcgatctccggcctccagcccgaagatgaggccgattactattgtgcagcgtgggacgactcactgaacgggtatctcttcggggcaggcactaaactcacggtgttg

SEQ ID NO: 237 - protein, 257 aa, Artificial Sequence
  source: /note="Description of Artificial Sequence: Synthetic polypeptide"
EVQLVQSGAEVKKPGSSVKVSCKASGGTFSSYAIGWVRQAPGQGLEWMGGIIPIFGIANYAQKFQGRVTITADESTSSAYMELSSLRSEDTAVYYCAREEGPYCSSTSCYAAFDIWGQGTLVTVSSASTGGGGSGGGGSGGGGSGGGGSQSVLTQDPAVSVALGQTVKITCQGDSLRSYFASWYQQKPGQAPTLVMYARNDRPAGVPDRFSGSKSGTSASLAISGLQPEDEADYYCAAWDDSLNGYLFGAGTKLTVL

SEQ ID NO: 238 - DNA, 2943 bp, Artificial Sequence
  source: /note="Description of Artificial Sequence: Synthetic polynucleotide"
gaggtgcaactggtagaaagcggaggtggtcttgtacagcccggtggttcactcagactgtcgtgcgcagcttcagggtatacgttcacctcctactggctccattgggtgcgacaggctccggggaaaggactggaatgggtcgggatgattgatccgtcgaattcggatactaggttcaatcccaacttcaaggaccggtttaccattagcgcggatacctcgaaaaacaccgcatatctccaaatgaactcgttgagagccgaggacacggcggtgtattactgcgcaagatacgggtcgtatgtgtcaccgttggactactggggccaggggacactggtaacggtcagctcagctagcacgaagggacctagcgtgttcccattggcgcccagctcgaaatccacatcgggcggaacggcagcccttgggtgcctcgtgaaagactactttcccgaaccggtgactgtgtcgtggaattcaggggcattgacttccggtgtccacacatttccagccgtgctgcagtccagcgggttgtattcgctctcgtcagtggtcacagtcccatcctcctcgctcggaacacaaacctatatctgtaatgtcaaccataaaccttcaaatacaaaagtggacaaaaaggtagaaccgaaatcatgcgataaaacacacacatgcccaccatgcccagcgcctgaacttttgggaggtccctcggtgtttttgtttcctcctaagcctaaggacaccctgatgatctcccgcactccggaagtgacgtgtgtcgtagtcgacgtcagccatgaggaccctgaggtgaaattcaactggtacgtagatggtgtggaggtgcataatgcaaaaactaagcctcgggaggaacaatatcaaagcacataccgggtcgtgtccgtgctcacggtacttcatcaggattggctcaacgggaaagaatacaaatgtaaggtgtccaacaaggctctcccggcaccgattgagaaaacgatcagcaaggccaaggggcagccccgagaaccccaagtatacacacttcccccgtccagggaggagatgaccaagaaccaggtgtcgctgtcgtgtgcggtcaaggggttttatcccagcgacatcgcggtagagtgggagtcgaacggccagcccgagaacaactacaagacaacaccgcctgtattggactcggacgggtcgtttttcctggtcagcaagctcacagtggataaaagccgctggcagcaggggaatgtattctcctgctccgtcatgcacgaggcgcttcacaaccattacacgcaaaaatccctgtccttgtccaagtcatgcgacaagacgggaggaggagggtcaggcggaggaggaagcgggggtggagggtccggtggtggtgggagcggaggtggagggagcggtggaggtggtagcgggggaggtggatcgggagggggtgggagctgtccgccatgtccagccccggaacttctcgggggaccgtcagtctttctttttccgccgaagcccaaggacaccttgatgattagccgcacgccggaggtcacgtgcgtagtagtggatgtatcccacgaggaccccgaggtcaaattcaattggtatgtcgacggagtggaagtacacaacgcaaagacaaagccgagagaagagcagtaccaatccacttatagggtagtctcggtcttgacagtactgcaccaggactggcttaatggaaaggaatacaagtgcaaagtctcaaacaaagccctccccgcacccatcgaaaagacaatctcgaaagcgaaaggacagcccagagagcctcaagtgtataccctgcccccgtcaagagaagagatgacgaagaaccaagtgtccctctggtgtctcgtgaaaggtttttaccccagcgatattgccgtcgaatgggaaagcaatggtcagcccgaaaacaattacaagactacgcctcccgtattggattcggatggttcgttcttcttgtactcaaagcttactgtcgataagtcgcggtggcagcaaggcaatgtgtttagctgttcggtaatgcatgaggcgctccacaatcactatacacagaagagcttgtccctcagcggggagtgcggaggtggagggagcggtggtgggggatccgaggtgcaactggtccagtcaggggcggaggtcaagaagcccggaagctccgtaaaggtatcatgcaaggcctcgggtggaaccttctcctcgtacgccatcggttgggtgagacaagctcccgggcagggcctcgaatggatgggcggaatcattcccatctttggaatcgcgaactatgcgcagaaatttcagggtagagtaacgattacagcggatgaatcgacttcgtccgcatacatggagctttcgtcacttcggtcagaggacactgccgtgtattactgtgcgcgggaggaaggcccgtattgtagctcgacctcgtgctacgctgcctttgacatttgggggcagggaacacttgtcacagtatcgagcgcgtccacgggcggagggggaagcggaggtgggggatcgggagggggaggatcagggggagggggctcccagagcgtgttgacccaagatccagctgtgtccgtcgcactgggacagacggtcaaaatcacgtgccagggtgactcgcttcgctcgtacttcgcgtcatggtatcagcaaaaacctggtcaggcaccgacgttggtgatgtacgcaaggaatgatcgacctgccggggtcccggacaggttctcggggagcaagagcgggacatccgcgtcgttggcgatctccggcctccagcccgaagatgaggccgattactattgtgcagcgtgggacgactcactgaacgggtatctcttcggggcaggcactaaactcacggtgttg

SEQ ID NO: 239 - protein, 981 aa, Artificial Sequence [sequence omitted]

SEQ ID NO: 240 - DNA, 57 bp, Artificial Sequence
  source: /note="Description of Artificial Sequence: Synthetic oligonucleotide"
atgggcttcggactgtcgtggctttttctggtggcgattcttaagggggtccagtgc

SEQ ID NO: 241 - protein, 19 aa, Artificial Sequence
  source: /note="Description of Artificial Sequence: Synthetic peptide"
MGFGLSWLFLVAILKGVQC

SEQ ID NO: 242 - DNA, 60 bp, Artificial Sequence
  source: /note="Description of Artificial Sequence: Synthetic oligonucleotide"
atgggcacccccgcacagctcttgttcttgctgcttctttggctccctgacacaactggt

SEQ ID NO: 243 - protein, 20 aa, Artificial Sequence
  source: /note="Description of Artificial Sequence: Synthetic peptide"
MGTPAQLLFLLLLWLPDTTG

SEQ ID NO: 244 - DNA, 708 bp, Artificial Sequence
  source: /note="Description of Artificial Sequence: Synthetic polynucleotide"
atgggctttggactttcgtggctttttctcgtagcgattttgaagggcgtgcagtgcgaggtgcaactggtagaaagcggaggtggtcttgtacagcccggtggttcactcagactgtcgtgcgcagcttcagggtatacgttcacctcctactggctccattgggtgcgacaggctccggggaaaggactggaatgggtcgggatgattgatccgtcgaattcggatactaggttcaatcccaacttcaaggaccggtttaccattagcgcggatacctcgaaaaacaccgcatatctccaaatgaactcgttgagagccgaggacacggcggtgtattactgcgcaagatacgggtcgtatgtgtcaccgttggactactggggccaggggacactggtaacggtcagctcagctagcacgaagggacctagcgtgttcccattggcgcccagctcgaaatccacatcgggcggaacggcagcccttgggtgcctcgtgaaagactactttcccgaaccggtgactgtgtcgtggaattcaggggcattgacttccggtgtccacacatttccagccgtgctgcagtccagcgggttgtattcgctctcgtcagtggtcacagtcccatcctcctcgctcggaacacaaacctatatctgtaatgtcaaccataaaccttcaaatacaaaagtggacaaaaaggta

SEQ ID NO: 245 - protein, 236 aa, Artificial Sequence
  source: /note="Description of Artificial Sequence: Synthetic polypeptide"
MGFGLSWLFLVAILKGVQCEVQLVESGGGLVQPGGSLRLSCAASGYTFTSYWLHWVRQAPGKGLEWVGMIDPSNSDTRFNPNFKDRFTISADTSKNTAYLQMNSLRAEDTAVYYCARYGSYVSPLDYWGQGTLVTVSSASTKGPSVFPLAPSSKSTSGGTAALGCLVKDYFPEPVTVSWNSGALTSGVHTFPAVLQSSGLYSLSSVVTVPSSSLGTQTYICNVNHKPSNTKVDKKV

SEQ ID NO: 246 - DNA, 720 bp, Artificial Sequence
  source: /note="Description of Artificial Sequence: Synthetic polynucleotide"
atgggcacccccgcacagctcttgttcttgctgcttctttggctccctgacacaactggtgacattcagatgacacagtcgccgtcgtcgcttagcgcgtcagtgggagatagggtgacgattacgtgcaagtcatcccagtcgctgttgtatacatcgagccagaagaactacctcgcgtggtaccaacagaagccggggaaagcgcccaaactcctgatctattgggcctcgaccagagagtccggagtaccatcgcgcttctcaggcagcgggagcgggacggacttcacactgacgatctcctccttgcaacccgaagattttgctacgtattactgtcaacaatactatgcctacccctggacctttggccagggtactaaggtcgagatcaaacgtacggtggccgctccctccgtctttatctttcctccaagcgacgagcagctgaagtctggcaccgcaagtgtggtgtgtctgctgaacaatttctaccccagggaagccaaagtgcaatggaaagtggataacgctctgcagtcaggaaattcccaggagagcgtcacagaacaagactctaaagatagtacttattcactgtccagcaccctgacactgtctaaggccgattatgagaaacacaaggtgtatgcctgtgaagtcactcatcaggggctgagttcacctgtgaccaaatcctttaacagaggtgagtgc

SEQ ID NO: 247 - protein, 240 aa, Artificial Sequence
  source: /note="Description of Artificial Sequence: Synthetic polypeptide"
MGTPAQLLFLLLLWLPDTTGDIQMTQSPSSLSASVGDRVTITCKSSQSLLYTSSQKNYLAWYQQKPGKAPKLLIYWASTRESGVPSRFSGSGSGTDFTLTISSLQPEDFATYYCQQYYAYPWTFGQGTKVEIKRTVAAPSVFIFPPSDEQLKSGTASVVCLLNNFYPREAKVQWKVDNALQSGNSQESVTEQDSKDSTYSLSSTLTLSKADYEKHKVYACEVTHQGLSSPVTKSFNRGEC

SEQ ID NO: 248 - protein, 12 aa, Artificial Sequence
  source: /note="Description of Artificial Sequence: Synthetic peptide"
PRDCGCKPCICT

SEQ ID NO: 249 - protein, 12 aa, Artificial Sequence
  source: /note="Description of Artificial Sequence: Synthetic peptide"
PKSCGCKPCICT

SEQ ID NO: 250 - protein, 12 aa, Artificial Sequence
  source: /note="Description of Artificial Sequence: Synthetic peptide"
PKSCGCKPCICP

SEQ ID NO: 251 - protein, 13 aa, Artificial Sequence
  source: /note="Description of Artificial Sequence: Synthetic peptide"
PRDCGCKPCPPCP

SEQ ID NO: 252 - protein, 13 aa, Artificial Sequence
  source: /note="Description of Artificial Sequence: Synthetic peptide"
PRDCGCHTCPPCP

SEQ ID NO: 253 - protein, 12 aa, Artificial Sequence
  source: /note="Description of Artificial Sequence: Synthetic peptide"
PKSCDCHCPPCP

SEQ ID NO: 254 - protein, 11 aa, Artificial Sequence
  source: /note="Description of Artificial Sequence: Synthetic peptide"
RKCCVECPPCP

SEQ ID NO: 255 - DNA, 705 bp, Artificial Sequence
  source: /note="Description of Artificial Sequence: Synthetic polynucleotide"
atgggattcggactctcctggttgtttttggtggcaattctcaagggcgtccaatgtcaggtacaacttgtgcagtcaggagcggaggtgaagaagcctggtgcatcggtcaaagtgtcatgcaaagcctcggggtacatctttactgcgtacacaatgcactgggtcagacaggctccgggacaaggtctggaatggatggggtggatcaagcccaataacgggctcgcgaattacgcccagaaattccaggggagagtgactatgacaagggatacgagcatttcgacggcgtatatggagctctcgcgcctgcggtcagatgacacagccgtatactattgcgcgcgatcggaaatcaccaccgaattcgactattggggtcagggaactcttgtcacggtatccagcgctagcaccaagggcccgtcagtattcccgcttgcaccctcgtcgaaatcaacatcgggcggaacagcagcccttggctgcttggtaaaagactacttcccagagccagtaacggtatcgtggaattccggagctcttacgtcgggggtccatacatttcccgcggtactccaatcgtcgggactgtactcattgtcgtcagtcgtgaccgtgccatccagctccttgggaacccagacttacatctgcaacgtcaaccacaagccctcgaacactaaagtggacaagaaagtg

SEQ ID NO: 256 - protein, 235 aa, Artificial Sequence
  source: /note="Description of Artificial Sequence: Synthetic polypeptide"
MGFGLSWLFLVAILKGVQCQVQLVQSGAEVKKPGASVKVSCKASGYIFTAYTMHWVRQAPGQGLEWMGWIKPNNGLANYAQKFQGRVTMTRDTSISTAYMELSRLRSDDTAVYYCARSEITTEFDYWGQGTLVTVSSASTKGPSVFPLAPSSKSTSGGTAALGCLVKDYFPEPVTVSWNSGALTSGVHTFPAVLQSSGLYSLSSVVTVPSSSLGTQTYICNVNHKPSNTKVDKKV

SEQ ID NO: 257 - DNA, 753 bp, Artificial Sequence
  source: /note="Description of Artificial Sequence: Synthetic polynucleotide"
caggtgcagctggtggagagcggcggcggcgtggtgcagcccggcgagagcctgagactgagctgcgccgtgagcggcttcagcctgaccaactacggcgtgcactgggtgagacaggcccccggcaagggcctggagtgggtgggcgtgatctggagcggcggcaacaccgactacaacacccccttcaccagcagattcaccatcagcaaggacaacagcaagaacaccgtgtacctgcagatgaacagcctgagagccgaggacaccgccgtgtactactgcgccagagccctgacctactacgactacgagttcgcctactggggccagggcaccctggtgaccgtgagcagcgccagcaccggcggcggcggcagcggcggcggcggcagcggcggcggcggcagcggcggcggcggcagcgacatcgtgctgacccagagccccgacttccagagcgtgacccccggcgagaaggtgaccatcacctgcagagccagccagagcatcggcaccaacatccactggtaccagcagaagcccgaccagagccccaagctgctgatcaagtacgccagcgagagcatcagcggcgtgcccagcagattcagcggcagcggcagcggcaccgacttcaccctgaccatcaacagcctggaggccgaggacgaggccacctactactgccagcagaacaacaactggcccaccaccttcggccagggcaccaaggtggagatcaagagaacc

SEQ ID NO: 258 - protein, 251 aa, Artificial Sequence
  source: /note="Description of Artificial Sequence: Synthetic polypeptide"
QVQLVESGGGVVQPGESLRLSCAVSGFSLTNYGVHWVRQAPGKGLEWVGVIWSGGNTDYNTPFTSRFTISKDNSKNTVYLQMNSLRAEDTAVYYCARALTYYDYEFAYWGQGTLVTVSSASTGGGGSGGGGSGGGGSGGGGSDIVLTQSPDFQSVTPGEKVTITCRASQSIGTNIHWYQQKPDQSPKLLIKYASESISGVPSRFSGSGSGTDFTLTINSLEAEDEATYYCQQNNNWPTTFGQGTKVEIKRT

SEQ ID NO: 259 - DNA, 2925 bp, Artificial Sequence
  source: /note="Description of Artificial Sequence: Synthetic polynucleotide"
gaggtgcaactggtagaaagcggaggtggtcttgtacagcccggtggttcactcagactgtcgtgcgcagcttcagggtatacgttcacctcctactggctccattgggtgcgacaggctccggggaaaggactggaatgggtcgggatgattgatccgtcgaattcggatactaggttcaatcccaacttcaaggaccggtttaccattagcgcggatacctcgaaaaacaccgcatatctccaaatgaactcgttgagagccgaggacacggcggtgtattactgcgcaagatacgggtcgtatgtgtcaccgttggactactggggccaggggacactggtaacggtcagctcagctagcacgaagggacctagcgtgttcccattggcgcccagctcgaaatccacatcgggcggaacggcagcccttgggtgcctcgtgaaagactactttcccgaaccggtgactgtgtcgtggaattcaggggcattgacttccggtgtccacacatttccagccgtgctgcagtccagcgggttgtattcgctctcgtcagtggtcacagtcccatcctcctcgctcggaacacaaacctatatctgtaatgtcaaccataaaccttcaaatacaaaagtggacaaaaaggtagaaccgaaatcatgcgataaaacacacacatgcccaccatgcccagcgcctgaacttttgggaggtccctcggtgtttttgtttcctcctaagcctaaggacaccctgatgatctcccgcactccggaagtgacgtgtgtcgtagtcgacgtcagccatgaggaccctgaggtgaaattcaactggtacgtagatggtgtggaggtgcataatgcaaaaactaagcctcgggaggaacaatatcaaagcacataccgggtcgtgtccgtgctcacggtacttcatcaggattggctcaacgggaaagaatacaaatgtaaggtgtccaacaaggctctcccggcaccgattgagaaaacgatcagcaaggccaaggggcagccccgagaaccccaagtatacacacttcccccgtccagggaggagatgaccaagaaccaggtgtcgctgtcgtgtgcggtcaaggggttttatcccagcgacatcgcggtagagtgggagtcgaacggccagcccgagaacaactacaagacaacaccgcctgtattggactcggacgggtcgtttttcctggtcagcaagctcacagtggataaaagccgctggcagcaggggaatgtattctcctgctccgtcatgcacgaggcgcttcacaaccattacacgcaaaaatccctgtccttgtccaagtcatgcgacaagacgggaggaggagggtcaggcggaggaggaagcgggggtggagggtccggtggtggtgggagcggaggtggagggagcggtggaggtggtagcgggggaggtggatcgggagggggtgggagctgtccgccatgtccagccccggaacttctcgggggaccgtcagtctttctttttccgccgaagcccaaggacaccttgatgattagccgcacgccggaggtcacgtgcgtagtagtggatgtatcccacgaggaccccgaggtcaaattcaattggtatgtcgacggagtggaagtacacaacgcaaagacaaagccgagagaagagcagtaccaatccacttatagggtagtctcggtcttgacagtactgcaccaggactggcttaatggaaaggaatacaagtgcaaagtctcaaacaaagccctccccgcacccatcgaaaagacaatctcgaaagcgaaaggacagcccagagagcctcaagtgtataccctgcccccgtcaagagaagagatgacgaagaaccaagtgtccctctggtgtctcgtgaaaggtttttaccccagcgatattgccgtcgaatgggaaagcaatggtcagcccgaaaacaattacaagactacgcctcccgtattggattcggatggttcgttcttcttgtactcaaagcttactgtcgataagtcgcggtggcagcaaggcaatgtgtttagctgttcggtaatgcatgaggcgctccacaatcactatacacagaagagcttgtccctcagcggggagtgcggaggtggagggagcggtggtgggggatcccaggtgcagctggtggagagcggcggcggcgtggtgcagcccggcgagagcctgagactgagctgcgccgtgagcggcttcagcctgaccaactacggcgtgcactgggtgagacaggcccccggcaagggcctggagtgggtgggcgtgatctggagcggcggcaacaccgactacaacacccccttcaccagcagattcaccatcagcaaggacaacagcaagaacaccgtgtacctgcagatgaacagcctgagagccgaggacaccgccgtgtactactgcgccagagccctgacctactacgactacgagttcgcctactggggccagggcaccctggtgaccgtgagcagcgccagcaccggcggcggcggcagcggcggcggcggcagcggcggcggcggcagcggcggcggcggcagcgacatcgtgctgacccagagccccgacttccagagcgtgacccccggcgagaaggtgaccatcacctgcagagccagccagagcatcggcaccaacatccactggtaccagcagaagcccgaccagagccccaagctgctgatcaagtacgccagcgagagcatcagcggcgtgcccagcagattcagcggcagcggcagcggcaccgacttcaccctgaccatcaacagcctggaggccgaggacgaggccacctactactgccagcagaacaacaactggcccaccaccttcggccagggcaccaaggtggagatcaagagaacc

SEQ ID NO: 260 - protein, 975 aa, Artificial Sequence [sequence omitted]

SEQ ID NO: 261 - protein, 104 aa, Homo sapiens
GPSVFLFPPKPKDTLMISRTPEVTCVVVDVSHEDPEVKFNWYVDGVEVHNAKTKPREEQYNSTYRVVSVLTVLHQDWLNGKEYKCKVSNKALPAPIEKTISKAK

SEQ ID NO: 262 - protein, 104 aa, Homo sapiens
GPSVFLFPPKPKDTLMISRTPEVTCVVVDVSQEDPEVQFNWYVDGVEVHNAKTKPREEQFNSTYRVVSVLTVLHQDWLNGKEYKCKVSNKGLPSSIEKTISKAK

SEQ ID NO: 263 - protein, 15 aa, Artificial Sequence
  source: /note="Description of Artificial Sequence: Synthetic peptide"
PPPPCDKTHTCPPCP

SEQ ID NO: 264 - protein, 13 aa, Artificial Sequence
  source: /note="Description of Artificial Sequence: Synthetic peptide"
EPKSCPPPCPPCP

SEQ ID NO: 265 - protein, 14 aa, Artificial Sequence
  source: /note="Description of Artificial Sequence: Synthetic peptide"
EPKSCPPCPCPPCP

SEQ ID NO: 266 - protein, 13 aa, Mus sp.
VPRDCGCKPCICT

SEQ ID NO: 267 - protein, 14 aa, Artificial Sequence
  source: /note="Description of Artificial Sequence: Synthetic peptide"
VPRDCTIKPCPPCP

SEQ ID NO: 268 - protein, 12 aa, Artificial Sequence
  source: /note="Description of Artificial Sequence: Synthetic peptide"
ERKPCVECPPCP

SEQ ID NO: 269 - protein, 12 aa, Artificial Sequence
  source: /note="Description of Artificial Sequence: Synthetic peptide"
ERKCPVECPPCP

SEQ ID NO: 270 - protein, 6 aa, Homo sapiens
VPPPPP

SEQ ID NO: 271 - protein, 15 aa, Artificial Sequence
  source: /note="Description of Artificial Sequence: Synthetic peptide"
EPKSCPCPPPPPCCP

SEQ ID NO: 272 - protein, 14 aa, Artificial Sequence
  source: /note="Description of Artificial Sequence: Synthetic peptide"
EPKSCPCPPPPCCP

SEQ ID NO: 273 - protein, 15 aa, Artificial Sequence
  source: /note="Description of Artificial Sequence: Synthetic peptide"
EPKSCPVPPPPPCCP

SEQ ID NO: 274 - DNA, 753 bp, Artificial Sequence
  source: /note="Description of Artificial Sequence: Synthetic polynucleotide"
caggtgcagctggtggagagcggcggcggcgtggtgcagcccggcgagagcctgagactgagctgcgccgtgagcggcttcagcctgaccaactacggcgtgcactgggtgagacaggcccccggcaagggcctggagtgggtgggcgtgatctggagcggcggcaacaccgactacaacacccccttcaccagcagattcaccatcagcaaggacaacagcaagaacaccgtgtacctgcagatgaacagcctgagagccgaggacaccgccgtgtactactgcgccagagccctgacctactacgactacgagttcgcctactggggccagggcaccctggtgaccgtgagcagcgccagcaccggcggcggcggcagcggcggcggcggcagcggcggcggcggcagcggcggcggcggcagcgacatcgtgctgacccagagccccagcagcctgagcgtgacccccggcgagaaggtgaccttcacctgcagagccagccagagcatcggcaccaacatccactggtaccagcagaagcccggccagagccccaagctgctgatcaagtacgccagcgagagcatcagcggcgtgcccagcagattcagcggcagcggcagcggcaccgacttcaccctgaccatcaacagcgtggaggccgaggacgaggccacctactactgccagcagaacaacaactggcccaccaccttcggccagggcaccaagctggagatcaagagaacc

SEQ ID NO: 275 - protein, 251 aa, Artificial Sequence
  source: /note="Description of Artificial Sequence: Synthetic polypeptide"
QVQLVESGGGVVQPGESLRLSCAVSGFSLTNYGVHWVRQAPGKGLEWVGVIWSGGNTDYNTPFTSRFTISKDNSKNTVYLQMNSLRAEDTAVYYCARALTYYDYEFAYWGQGTLVTVSSASTGGGGSGGGGSGGGGSGGGGSDIVLTQSPSSLSVTPGEKVTFTCRASQSIGTNIHWYQQKPGQSPKLLIKYASESISGVPSRFSGSGSGTDFTLTINSVEAEDEATYYCQQNNNWPTTFGQGTKLEIKRT

SEQ ID NO: 276 - DNA, 753 bp, Artificial Sequence
  source: /note="Description of Artificial Sequence: Synthetic polynucleotide"
caggtgcagctggtggagagcggcggcggcgtggtgcagcccggcgagagcctgagaatcagctgcgccgtgagcggcttcagcctgaccaactacggcgtgcactgggtgagacaggcccccggcaagggcctggagtggctgggcgtgatctggagcggcggcaacaccgactacaacacccccttcaccagcagactgaccatcagcaaggacaacagcaagagcaccgtgtacttccagatgaacagcctgagagccgaggacaccgccgtgtactactgcgccagagccctgacctactacgactacgagttcgcctactggggccagggcaccctggtgaccgtgagcagcgccagcaccggcggcggcggcagcggcggcggcggcagcggcggcggcggcagcggcggcggcggcagcgacatcgtgctgacccagagccccgacttccagagcgtgacccccggcgagaaggtgaccatcacctgcagagccagccagagcatcggcaccaacatccactggtaccagcagaagcccgaccagagccccaagctgctgatcaagtacgccagcgagagcatcagcggcgtgcccagcagattcagcggcagcggcagcggcaccgacttcaccctgaccatcaacagcctggaggccgaggacgaggccacctactactgccagcagaacaacaactggcccaccaccttcggccagggcaccaaggtggagatcaagagaacc

SEQ ID NO: 277 - protein, 251 aa, Artificial Sequence
  source: /note="Description of Artificial Sequence: Synthetic polypeptide"
QVQLVESGGGVVQPGESLRISCAVSGFSLTNYGVHWVRQAPGKGLEWLGVIWSGGNTDYNTPFTSRLTISKDNSKSTVYFQMNSLRAEDTAVYYCARALTYYDYEFAYWGQGTLVTVSSASTGGGGSGGGGSGGGGSGGGGSDIVLTQSPDFQSVTPGEKVTITCRASQSIGTNIHWYQQKPDQSPKLLIKYASESISGVPSRFSGSGSGTDFTLTINSLEAEDEATYYCQQNNNWPTTFGQGTKVEIKRT

SEQ ID NO: 278 - DNA, 753 bp, Artificial Sequence
  source: /note="Description of Artificial Sequence: Synthetic polynucleotide"
caggtgcagctggtggagagcggcggcggcgtggtgcagcccggcgagagcctgagaatcagctgcgccgtgagcggcttcagcctgaccaactacggcgtgcactgggtgagacaggcccccggcaagggcctggagtggctgggcgtgatctggagcggcggcaacaccgactacaacacccccttcaccagcagactgaccatcagcaaggacaacagcaagagcaccgtgtacttccagatgaacagcctgagagccgaggacaccgccgtgtactactgcgccagagccctgacctactacgactacgagttcgcctactggggccagggcaccctggtgaccgtgagcagcgccagcaccggcggcggcggcagcggcggcggcggcagcggcggcggcggcagcggcggcggcggcagcgacatcgtgctgacccagagccccagcagcctgagcgtgacccccggcgagaaggtgaccttcacctgcagagccagccagagcatcggcaccaacatccactggtaccagcagaagcccggccagagccccaagctgctgatcaagtacgccagcgagagcatcagcggcgtgcccagcagattcagcggcagcggcagcggcaccgacttcaccctgaccatcaacagcgtggaggccgaggacgaggccacctactactgccagcagaacaacaactggcccaccaccttcggccagggcaccaagctggagatcaagagaacc

SEQ ID NO: 279 - protein, 251 aa, Artificial Sequence
  source: /note="Description of Artificial Sequence: Synthetic polypeptide"
QVQLVESGGGVVQPGESLRISCAVSGFSLTNYGVHWVRQAPGKGLEWLGVIWSGGNTDYNTPFTSRLTISKDNSKSTVYFQMNSLRAEDTAVYYCARALTYYDYEFAYWGQGTLVTVSSASTGGGGSGGGGSGGGGSGGGGSDIVLTQSPSSLSVTPGEKVTFTCRASQSIGTNIHWYQQKPGQSPKLLIKYASESISGVPSRFSGSGSGTDFTLTINSVEAEDEATYYCQQNNNWPTTFGQGTKLEIKRT

SEQ ID NO: 280 - DNA, 2925 bp, Artificial Sequence
  source: /note="Description of Artificial Sequence: Synthetic polynucleotide"
gaggtgcaactggtagaaagcggaggtggtcttgtacagcccggtggttcactcagactgtcgtgcgcagcttcagggtatacgttcacctcctactggctccattgggtgcgacaggctccggggaaaggactggaatgggtcgggatgattgatccgtcgaattcggatactaggttcaatcccaacttcaaggaccggtttaccattagcgcggatacctcgaaaaacaccgcatatctccaaatgaactcgttgagagccgaggacacggcggtgtattactgcgcaagatacgggtcgtatgtgtcaccgttggactactggggccaggggacactggtaacggtcagctcagctagcacgaagggacctagcgtgttcccattggcgcccagctcgaaatccacatcgggcggaacggcagcccttgggtgcctcgtgaaagactactttcccgaaccggtgactgtgtcgtggaattcaggggcattgacttccggtgtccacacatttccagccgtgctgcagtccagcgggttgtattcgctctcgtcagtggtcacagtcccatcctcctcgctcggaacacaaacctatatctgtaatgtcaaccataaaccttcaaatacaaaagtggacaaaaaggtagaaccgaaatcatgcgataaaacacacacatgcccaccatgcccagcgcctgaacttttgggaggtccctcggtgtttttgtttcctcctaagcctaaggacaccctgatgatctcccgcactccggaagtgacgtgtgtcgtagtcgacgtcagccatgaggaccctgaggtgaaattcaactggtacgtagatggtgtggaggtgcataatgcaaaaactaagcctcgggaggaacaatatcaaagcacataccgggtcgtgtccgtgctcacggtacttcatcaggattggctcaacgggaaagaatacaaatgtaaggtgtccaacaaggctctcccggcaccgattgagaaaacgatcagcaaggccaaggggcagccccgagaaccccaagtatacacacttcccccgtccagggaggagatgaccaagaaccaggtgtcgctgtcgtgtgcggtcaaggggttttatcccagcgacatcgcggtagagtgggagtcgaacggccagcccgagaacaactacaagacaacaccgcctgtattggactcggacgggtcgtttttcctggtcagcaagctcacagtggataaaagccgctggcagcaggggaatgtattctcctgctccgtcatgcacgaggcgcttcacaaccattacacgcaaaaatccctgtccttgtccaagtcatgcgacaagacgggaggaggagggtcaggcggaggaggaagcgggggtggagggtccggtggtggtgggagcggaggtggagggagcggtggaggtggtagcgggggaggtggatcgggagggggtgggagctgtccgccatgtccagccccggaacttctcgggggaccgtcagtctttctttttccgccgaagcccaaggacaccttgatgattagccgcacgccggaggtcacgtgcgtagtagtggatgtatcccacgaggaccccgaggtcaaattcaattggtatgtcgacggagtggaagtacacaacgcaaagacaaagccgagagaagagcagtaccaatccacttatagggtagtctcggtcttgacagtactgcaccaggactggcttaatggaaaggaatacaagtgcaaagtctcaaacaaagccctccccgcacccatcgaaaagacaatctcgaaagcgaaaggacagcccagagagcctcaagtgtataccctgcccccgtcaagagaagagatgacgaagaaccaagtgtccctctggtgtctcgtgaaaggtttttaccccagcgatattgccgtcgaatgggaaagcaatggtcagcccgaaaacaattacaagactacgcctcccgtattggattcggatggttcgttcttcttgtactcaaagcttactgtcgataagtcgcggtggcagcaaggcaatgtgtttagctgttcggtaatgcatgaggcgctccacaatcactatacacagaagagcttgtccctcagcggggagtgcggaggtggagggagcggtggtgggggatcccaggtgcagctggtggagagcggcggcggcgtggtgcagcccggcgagagcctgagactgagctgcgccgtgagcggcttcagcctgaccaactacggcgtgcactgggtgagacaggcccccggcaagggcctggagtgggtgggcgtgatctggagcggcggcaacaccgactacaacacccccttcaccagcagattcaccatcagcaaggacaacagcaagaacaccgtgtacctgcagatgaacagcctgagagccgaggacaccgccgtgtactactgcgccagagccctgacctactacgactacgagttcgcctactggggccagggcaccctggtgaccgtgagcagcgccagcaccggcggcggcggcagcggcggcggcggcagcggcggcggcggcagcggcggcggcggcagcgacatcgtgctgacccagagccccagcagcctgagcgtgacccccggcgagaaggtgaccttcacctgcagagccagccagagcatcggcaccaacatccactggtaccagcagaagcccggccagagccccaagctgctgatcaagtacgccagcgagagcatcagcggcgtgcccagcagattcagcggcagcggcagcggcaccgacttcaccctgaccatcaacagcgtggaggccgaggacgaggccacctactactgccagcagaacaacaactggcccaccaccttcggccagggcaccaagctggagatcaagagaacc

SEQ ID NO: 281 - protein, 975 aa, Artificial Sequence
  source: /note="Description of Artificial Sequence: Synthetic polypeptide"
EVQLVESGGGLVQPGGSLRLSCAASGYTFTSYWLHWVRQAPGKGLEWVGMIDPSNSDTRFNPNFKDRFTISADTSKNTAYLQMNSLRAEDTAVYYCARYGSYVSPLDYWGQGTLVTVSSASTKGPSVFPLAPSSKSTSGGTAALGCLVKDYFPEPVTVSWNSGALTSGVHTFPAVLQSSGLYSLSSVVTVPSSSLGTQTYICNVNHKPSNTKVDKKVEPKSCDKTHTCPPCPAPELLGGPSVFLFPPKPKDTLMISRTPEVTCVVVDVSHEDPEVKFNWYVDGVEVHNAKTKPREEQYQSTYRVVSVLTVLHQDWLNGKEYKCKVSNKALPAPIEKTISKAKGQPREPQVYTLPPSREEMTKNQVSLSCAVKGFYPSDIAVEWESNGQPENNYKTTPPVLDSDGSFFLVSKLTVDKSRWQQGNVFSCSVMHEALHNHYTQKSLSLSKSCDKTGGGGSGGGGSGGGGSGGGGSGGGGSGGGGSGGGGSGGGGSCPPCPAPELLGGPSVFLFPPKPKDTLMISRTPEVTCVVVDVSHEDPEVKFNWYVDGVEVHNAKTKPREEQYQSTYRVVSVLTVLHQDWLNGKEYKCKVSNKALPAPIEKTISKAKGQPREPQVYTLPPSREEMTKNQVSLWCLVKGFYPSDIAVEWESNGQPENNYKTTPPVLDSDGSFFLYSKLTVDKSRWQQGNVFSCSVMHEALHNHYTQKSLSLSGECGGGGSGGGGSQVQLVESGGGVVQPGESLRLSCAVSGFSLTNYGVHWVRQAPGKGLEWVGVIWSGGNTDYNTPFTSRFTISKDNSKNTVYLQMNSLRAEDTAVYYCARALTYYDYEFAYWGQGTLVTVSSASTGGGGSGGGGSGGGGSGGGGSDIVLTQSPSSLSVTPGEKVTFTCRASQSIGTNIHWYQQKPGQSPKLLIKYASESISGVPSRFSGSGSGTDFTLTINSVEAEDEATYYCQQNNNWPTTFGQGTKLEIKRT

SEQ ID NO: 282 - DNA, 2925 bp, Artificial Sequence
  source: /note="Description of Artificial Sequence: Synthetic polynucleotide"
gaggtgcaactggtagaaagcggaggtggtcttgtacagcccggtggttcactcagactgtcgtgcgcagcttcagggtatacgttcacctcctactggctccattgggtgcgacaggctccggggaaaggactggaatgggtcgggatgattgatccgtcgaattcggatactaggttcaatcccaacttcaaggaccggtttaccattagcgcggatacctcgaaaaacaccgcatatctccaaatgaactcgttgagagccgaggacacggcggtgtattactgcgcaagatacgggtcgtatgtgtcaccgttggactactggggccaggggacactggtaacggtcagctcagctagcacgaagggacctagcgtgttcccattggcgcccagctcgaaatccacatcgggcggaacggcagcccttgggtgcctcgtgaaagactactttcccgaaccggtgactgtgtcgtggaattcaggggcattgacttccggtgtccacacatttccagccgtgctgcagtccagcgggttgtattcgctctcgtcagtggtcacagtcccatcctcctcgctcggaacacaaacctatatctgtaatgtcaaccataaaccttcaaatacaaaagtggacaaaaaggtagaaccgaaatcatgcgataaaacacacacatgcccaccatgcccagcgcctgaacttttgggaggtccctcggtgtttttgtttcctcctaagcctaaggacaccctgatgatctcccgcactccggaagtgacgtgtgtcgtagtcgacgtcagccatgaggaccctgaggtgaaattcaactggtacgtagatggtgtggaggtgcataatgcaaaaactaagcctcgggaggaacaatatcaaagcacataccgggtcgtgtccgtgctcacggtacttcatcaggattggctcaacgggaaagaatacaaatgtaaggtgtccaacaaggctctcccggcaccgattgagaaaacgatcagcaaggccaaggggcagccccgagaaccccaagtatacacacttcccccgtccagggaggagatgaccaagaaccaggtgtcgctgtcgtgtgcggtcaaggggttttatcccagcgacatcgcggtagagtgggagtcgaacggccagcccgagaacaactacaagacaacaccgcctgtattggactcggacgggtcgtttttcctggtcagcaagctcacagtggataaaagccgctggcagcaggggaatgtattctcctgctccgtcatgcacgaggcgcttcacaaccattacacgcaaaaatccctgtccttgtccaagtcatgcgacaagacgggaggaggagggtcaggcggaggaggaagcgggggtggagggtccggtggtggtgggagcggaggtggagggagcggtggaggtggtagcgggggaggtggatcgggagggggtgggagctgtccgccatgtccagccccggaacttctcgggggaccgtcagtctttctttttccgccgaagcccaaggacaccttgatgattagccgcacgccggaggtcacgtgcgtagtagtggatgtatcccacgaggaccccgaggtcaaattcaattggtatgtcgacggagtggaagtacacaacgcaaagacaaagccgagagaagagcagtaccaatccacttatagggtagtctcggtcttgacagtactgcaccaggactggcttaatggaaaggaatacaagtgcaaagtctcaaacaaagccctccccgcacccatcgaaaagacaatctcgaaagcgaaaggacagcccagagagcctcaagtgtataccctgcccccgtcaagagaagagatgacgaagaaccaagtgtccctctggtgtctcgtgaaaggtttttaccccagcgatattgccgtcgaatgggaaagcaatggtcagcccgaaaacaattacaagactacgcctcccgtattggattcggatggttcgttcttcttgtactcaaagcttactgtcgataagtcgcggtggcagcaaggcaatgtgtttagctgttcggtaatgcatgaggcgctccacaatcactatacacagaagagcttgtccctcagcggggagtgcggaggtggagggagcggtggtgggggatcccaggtgcagctggtggagagcggcggcggcgtggtgcagcccggcgagagcctgagaatcagctgcgccgtgagcggcttcagcctgaccaactacggcgtgcactgggtgagacaggcccccggcaagggcctggagtggctgggcgtgatctggagcggcggcaacaccgactacaacacccccttcaccagcagactgaccatcagcaaggacaacagcaagagcaccgtgtacttccagatgaacagcctgagagccgaggacaccgccgtgtactactgcgccagagccctgacctactacgactacgagttcgcctactggggccagggcaccctggtgaccgtgagcagcgccagcaccggcggcggcggcagcggcggcggcggcagcggcggcggcggcagcggcggcggcggcagcgacatcgtgctgacccagagccccgacttccagagcgtgacccccggcgagaaggtgaccatcacctgcagagccagccagagcatcggcaccaacatccactggtaccagcagaagcccgaccagagccccaagctgctgatcaagtacgccagcgagagcatcagcggcgtgcccagcagattcagcggcagcggcagcggcaccgacttcaccctgaccatcaacagcctggaggccgaggacgaggccacctactactgccagcagaacaacaactggcccaccaccttcggccagggcaccaaggtggagatcaagagaacc

SEQ ID NO: 283 - protein, 975 aa, Artificial Sequence [sequence omitted]

SEQ ID NO: 284 - DNA, 2925 bp, Artificial Sequence
  source: /note="Description of Artificial Sequence: Synthetic polynucleotide"
gaggtgcaactggtagaaagcggaggtggtcttgtacagcccggtggttcactcagactgtcgtgcgcagcttcagggtatacgttcacctcctactggctccattgggtgcgacaggctccggggaaaggactggaatgggtcgggatgattgatccgtcgaattcggatactaggttcaatcccaacttcaaggaccggtttaccattagcgcggatacctcgaaaaacaccgcatatctccaaatgaactcgttgagagccgaggacacggcggtgtattactgcgcaagatacgggtcgtatgtgtcaccgttggactactggggccaggggacactggtaacggtcagctcagctagcacgaagggacctagcgtgttcccattggcgcccagctcgaaatccacatcgggcggaacggcagcccttgggtgcctcgtgaaagactactttcccgaaccggtgactgtgtcgtggaattcaggggcattgacttccggtgtccacacatttccagccgtgctgcagtccagcgggttgtattcgctctcgtcagtggtcacagtcccatcctcctcgctcggaacacaaacctatatctgtaatgtcaaccataaaccttcaaatacaaaagtggacaaaaaggtagaaccgaaatcatgcgataaaacacacacatgcccaccatgcccagcgcctgaacttttgggaggtccctcggtgtttttgtttcctcctaagcctaaggacaccctgatgatctcccgcactccggaagtgacgtgtgtcgtagtcgacgtcagccatgaggaccctgaggtgaaattcaactggtacgtagatggtgtggaggtgcataatgcaaaaactaagcctcgggaggaacaatatcaaagcacataccgggtcgtgtccgtgctcacggtacttcatcaggattggctcaacgggaaagaatacaaatgtaaggtgtccaacaaggctctcccggcaccgattgagaaaacgatcagcaaggccaaggggcagccccgagaaccccaagtatacacacttcccccgtccagggaggagatgaccaagaaccaggtgtcgctgtcgtgtgcggtcaaggggttttatcccagcgacatcgcggtagagtgggagtcgaacggccagcccgagaacaactacaagacaacaccgcctgtattggactcggacgggtcgtttttcctggtcagcaagctcacagtggataaaagccgctggcagcaggggaatgtattctcctgctccgtcatgcacgaggcgcttcacaaccattacacgcaaaaatccctgtccttgtccaagtcatgcgacaagacgggaggaggagggtcaggcggaggaggaagcgggggtggagggtccggtggtggtgggagcggaggtggagggagcggtggaggtggtagcgggggaggtggatcgggagggggtgggagctgtccgccatgtccagccccggaacttctcgggggaccgtcagtctttctttttccgccgaagcccaaggacaccttgatgattagccgcacgccggaggtcacgtgcgtagtagtggatgtatcccacgaggaccccgaggtcaaattcaattggtatgtcgacggagtggaagtacacaacgcaaagacaaagccgagagaagagcagtaccaatccacttatagggtagtctcggtcttgacagtactgcaccaggactggcttaatggaaaggaatacaagtgcaaagtctcaaacaaagccctccccgcacccatcgaaaagacaatctcgaaagcgaaaggacagcccagagagcctcaagtgtataccctgcccccgtcaagagaagagatgacgaagaaccaagtgtccctctggtgtctcgtgaaaggtttttaccccagcgatattgccgtcgaatgggaaagcaatggtcagcccgaaaacaattacaagactacgcctcccgtattggattcggatggttcgttcttcttgtactcaaagcttactgtcgataagtcgcggtggcagcaaggcaatgtgtttagctgttcggtaatgcatgaggcgctccacaatcactatacacagaagagcttgtccctcagcggggagtgcggaggtggagggagcggtggtgggggatcccaggtgcagctggtggagagcggcggcggcgtggtgcagcccggcgagagcctgagaatcagctgcgccgtgagcggcttcagcctgaccaactacggcgtgcactgggtgagacaggcccccggcaagggcctggagtggctgggcgtgatctggagcggcggcaacaccgactacaacacccccttcaccagcagactgaccatcagcaaggacaacagcaagagcaccgtgtacttccagatgaacagcctgagagccgaggacaccgccgtgtactactgcgccagagccctgacctactacgactacgagttcgcctactggggccagggcaccctggtgaccgtgagcagcgccagcaccggcggcggcggcagcggcggcggcggcagcggcggcggcggcagcggcggcggcggcagcgacatcgtgctgacccagagccccagcagcctgagcgtgacccccggcgagaaggtgaccttcacctgcagagccagccagagcatcggcaccaacatccactggtaccagcagaagcccggccagagccccaagctgctgatcaagtacgccagcgagagcatcagcggcgtgcccagcagattcagcggcagcggcagcggcaccgacttcaccctgaccatcaacagcgtggaggccgaggacgaggccacctactactgccagcagaacaacaactggcccaccaccttcggccagggcaccaagctggagatcaagagaacc

SEQ ID NO: 285 - protein, 975 aa, Artificial Sequence [sequence omitted]

SEQ ID NO: 286 - DNA, 648 bp, Artificial Sequence
  source: /note="Description of Artificial Sequence: Synthetic polynucleotide"
caggtacaacttgtgcagtcaggagcggaggtgaagaagcctggtgcatcggtcaaagtgtcatgcaaagcctcggggtacatctttactgcgtacacaatgcactgggtcagacaggctccgggacaaggtctggaatggatggggtggatcaagcccaataacgggctcgcgaattacgcccagaaattccaggggagagtgactatgacaagggatacgagcatttcgacggcgtatatggagctctcgcgcctgcggtcagatgacacagccgtatactattgcgcgcgatcggaaatcaccaccgaattcgactattggggtcagggaactcttgtcacggtatccagcgctagcaccaagggcccgtcagtattcccgcttgcaccctcgtcgaaatcaacatcgggcggaacagcagcccttggctgcttggtaaaagactacttcccagagccagtaacggtatcgtggaattccggagctcttacgtcgggggtccatacatttcccgcggtactccaatcgtcgggactgtactcattgtcgtcagtcgtgaccgtgccatccagctccttgggaacccagacttacatctgcaacgtcaaccacaagccctcgaacactaaagtggacaagaaagtg

SEQ ID NO: 287 - protein, 216 aa, Artificial Sequence
  source: /note="Description of Artificial Sequence: Synthetic polypeptide"
QVQLVQSGAEVKKPGASVKVSCKASGYIFTAYTMHWVRQAPGQGLEWMGWIKPNNGLANYAQKFQGRVTMTRDTSISTAYMELSRLRSDDTAVYYCARSEITTEFDYWGQGTLVTVSSASTKGPSVFPLAPSSKSTSGGTAALGCLVKDYFPEPVTVSWNSGALTSGVHTFPAVLQSSGLYSLSSVVTVPSSSLGTQTYICNVNHKPSNTKVDKKV

SEQ ID NO: 288 - DNA, 654 bp, Artificial Sequence
  source: /note="Description of Artificial Sequence: Synthetic polynucleotide"
gacatcgtgctgacccagtcaccggattcgcttgcagtctcactgggagagagagccacgatcaattgcaagtcctcggaatcagtggacagctacgctaactcattcatgcactggtatcagcagaagcctggccagccgcccaagttgctgatctaccgcgcaagcacacgggagtcgggggtgccagataggttttccggatcgggttcccgaacggacttcacactcacgatttcatccttgcaagccgaagatgtggcggtctattactgtcaacagtcgaaagaggatccccttacttttggtgggggtactaaagtagagattaagcgtacggtggcagcgccgtcagtctttatcttccctccttcggatgagcagcttaagagcgggacagcctcagtagtctgccttctcaacaacttttacccgagagaggccaaggtgcagtggaaggtggataatgccttgcagtcagggaactcacaagaatcggtcacagaacaggactccaaagatagcacttattccctgtcaagcacgctcactttgtccaaagcggactacgagaagcacaaagtgtacgcttgcgaggtgactcatcaaggattgtcgagccccgtaacgaagagcttcaatcggggcgagtgt

SEQ ID NO: 289 - protein, 218 aa, Artificial Sequence
  source: /note="Description of Artificial Sequence: Synthetic polypeptide"
DIVLTQSPDSLAVSLGERATINCKSSESVDSYANSFMHWYQQKPGQPPKLLIYRASTRESGVPDRFSGSGSRTDFTLTISSLQAEDVAVYYCQQSKEDPLTFGGGTKVEIKRTVAAPSVFIFPPSDEQLKSGTASVVCLLNNFYPREAKVQWKVDNALQSGNSQESVTEQDSKDSTYSLSSTLTLSKADYEKHKVYACEVTHQGLSSPVTKSFNRGEC

SEQ ID NO: 290 - DNA, 2922 bp, Artificial Sequence
  source: /note="Description of Artificial Sequence: Synthetic polynucleotide"
caggtacaacttgtgcagtcaggagcggaggtgaagaagcctggtgcatcggtcaaagtgtcatgcaaagcctcggggtacatctttactgcgtacacaatgcactgggtcagacaggctccgggacaaggtctggaatggatggggtggatcaagcccaataacgggctcgcgaattacgcccagaaattccaggggagagtgactatgacaagggatacgagcatttcgacggcgtatatggagctctcgcgcctgcggtcagatgacacagccgtatactattgcgcgcgatcggaaatcaccaccgaattcgactattggggtcagggaactcttgtcacggtatccagcgctagcaccaagggcccgtcagtattcccgcttgcaccctcgtcgaaatcaacatcgggcggaacagcagcccttggctgcttggtaaaagactacttcccagagccagtaacggtatcgtggaattccggagctcttacgtcgggggtccatacatttcccgcggtactccaatcgtcgggactgtactcattgtcgtcagtcgtgaccgtgccatccagctccttgggaacccagacttacatctgcaacgtcaaccacaagccctcgaacactaaagtggacaagaaagtggaaccgaaatcatgcgataaaacacacacatgcccaccatgcccagcgcctgaacttttgggaggtccctcggtgtttttgtttcctcctaagcctaaggacaccctgatgatctcccgcactccggaagtgacgtgtgtcgtagtcgacgtcagccatgaggaccctgaggtgaaattcaactggtacgtagatggtgtggaggtgcataatgcaaaaactaagcctcgggaggaacaatatcaaagcacataccgggtcgtgtccgtgctcacggtacttcatcaggattggctcaacgggaaagaatacaaatgtaaggtgtccaacaaggctctcccggcaccgattgagaaaacgatcagcaaggccaaggggcagccccgagaaccccaagtatacacacttcccccgtccagggaggagatgaccaagaaccaggtgtcgctgtcgtgtgcggtcaaggggttttatcccagcgacatcgcggtagagtgggagtcgaacggccagcccgagaacaactacaagacaacaccgcctgtattggactcggacgggtcgtttttcctggtcagcaagctcacagtggataaaagccgctggcagcaggggaatgtattctcctgctccgtcatgcacgaggcgcttcacaaccattacacgcaaaaatccctgtccttgtccaagtcatgcgacaagacgggaggaggagggtcaggcggaggaggaagcgggggtggagggtccggtggtggtgggagcggaggtggagggagcggtggaggtggtagcgggggaggtggatcgggagggggtgggagctgtccgccatgtccagccccggaacttctcgggggaccgtcagtctttctttttccgccgaagcccaaggacaccttgatgattagccgcacgccggaggtcacgtgcgtagtagtggatgtatcccacgaggaccccgaggtcaaattcaattggtatgtcgacggagtggaagtacacaacgcaaagacaaagccgagagaagagcagtaccaatccacttatagggtagtctcggtcttgacagtactgcaccaggactggcttaatggaaaggaatacaagtgcaaagtctcaaacaaagccctccccgcacccatcgaaaagacaatctcgaaagcgaaaggacagcccagagagcctcaagtgtataccctgcccccgtcaagagaagagatgacgaagaaccaagtgtccctctggtgtctcgtgaaaggtttttaccccagcgatattgccgtcgaatgggaaagcaatggtcagcccgaaaacaattacaagactacgcctcccgtattggattcggatggttcgttcttcttgtactcaaagcttactgtcgataagtcgcggtggcagcaaggcaatgtgtttagctgttcggtaatgcatgaggcgctccacaatcactatacacagaagagcttgtccctcagcggggagtgcggaggtggagggagcggtggtgggggatcccaggtgcagctggtggagagcggcggcggcgtggtgcagcccggcgagagcctgagactgagctgcgccgtgagcggcttcagcctgaccaactacggcgtgcactgggtgagacaggcccccggcaagggcctggagtgggtgggcgtgatctggagcggcggcaacaccgactacaacacccccttcaccagcagattcaccatcagcaaggacaacagcaagaacaccgtgtacctgcagatgaacagcctgagagccgaggacaccgccgtgtactactgcgccagagccctgacctactacgactacgagttcgcctactggggccagggcaccctggtgaccgtgagcagcgccagcaccggcggcggcggcagcggcggcggcggcagcggcggcggcggcagcggcggcggcggcagcgacatcgtgctgacccagagccccgacttccagagcgtgacccccggcgagaaggtgaccatcacctgcagagccagccagagcatcggcaccaacatccactggtaccagcagaagcccgaccagagccccaagctgctgatcaagtacgccagcgagagcatcagcggcgtgcccagcagattcagcggcagcggcagcggcaccgacttcaccctgaccatcaacagcctggaggccgaggacgaggccacctactactgccagcagaacaacaactggcccaccaccttcggccagggcaccaaggtggagatcaagagaacc

SEQ ID NO: 291 - protein, 974 aa, Artificial Sequence
  source: /note="Description of Artificial Sequence: Synthetic polypeptide"
QVQLVQSGAEVKKPGASVKVSCKASGYIFTAYTMHWVRQAPGQGLEWMGWIKPNNGLANYAQKFQGRVTMTRDTSISTAYMELSRLRSDDTAVYYCARSEITTEFDYWGQGTLVTVSSASTKGPSVFPLAPSSKSTSGGTAALGCLVKDYFPEPVTVSWNSGALTSGVHTFPAVLQSSGLYSLSSVVTVPSSSLGTQTYICNVNHKPSNTKVDKKVEPKSCDKTHTCPPCPAPELLGGPSVFLFPPKPKDTLMISRTPEVTCVVVDVSHEDPEVKFNWYVDGVEVHNAKTKPREEQYQSTYRVVSVLTVLHQDWLNGKEYKCKVSNKALPAPIEKTISKAKGQPREPQVYTLPPSREEMTKNQVSLSCAVKGFYPSDIAVEWESNGQPENNYKTTPPVLDSDGSFFLVSKLTVDKSRWQQGNVFSCSVMHEALHNHYTQKSLSLSKSCDKTGGGGSGGGGSGGGGSGGGGSGGGGSGGGGSGGGGSGGGGSCPPCPAPELLGGPSVFLFPPKPKDTLMISRTPEVTCVVVDVSHEDPEVKFNWYVDGVEVHNAKTKPREEQYQSTYRVVSVLTVLHQDWLNGKEYKCKVSNKALPAPIEKTISKAKGQPREPQVYTLPPSREEMTKNQVSLWCLVKGFYPSDIAVEWESNGQPENNYKTTPPVLDSDGSFFLYSKLTVDKSRWQQGNVFSCSVMHEALHNHYTQKSLSLSGECGGGGSGGGGSQVQLVESGGGVVQPGESLRLSCAVSGFSLTNYGVHWVRQAPGKGLEWVGVIWSGGNTDYNTPFTSRFTISKDNSKNTVYLQMNSLRAEDTAVYYCARALTYYDYEFAYWGQGTLVTVSSASTGGGGSGGGGSGGGGSGGGGSDIVLTQSPDFQSVTPGEKVTITCRASQSIGTNIHWYQQKPDQSPKLLIKYASESISGVPSRFSGSGSGTDFTLTINSLEAEDEATYYCQQNNNWPTTFGQGTKVEIKRT

SEQ ID NO: 292 - DNA, 1530 bp, Artificial Sequence
  source: /note="Description of Artificial Sequence: Synthetic polynucleotide"
atgggcttcggactgtcgtggctttttctggtggcgattcttaagggggtccagtgcgataagacccacacatgccctccctgtccagcacccgagctgctcgggggaccctcggtgttcttgtttcctcccaaacccaaagatacccttatgattagccggacaccagaggtgacgtgcgtggtagtagacgtgtcccatgaggacccggaggtcaagttcaactggtacgtggacggagtggaggtgcacaatgcaaagaccaagccgagggaagagcaataccagtccacatatagagtcgtgtcggtccttacggtcttgcatcaggactggctgaatggcaaagaatacaaatgtaaagtctccaacaaagctctcccagcgcccattgagaaaacaatctcaaaagcgaaaggccaaccgagagaacctcaagtctatactcttcccccgtcgagagaggaaatgaccaaaaaccaggtatccctgtcatgcgcggtcaaggggttttacccaagcgacatcgccgtggagtgggagtcgaacggacagccagagaataactataagacgacccctcccgtgctggattcggatggatcgttctttcttgtcagcaaactcacagtcgacaaatcaaggtggcagcaagggaacgtgttcagctgttcggtaatgcatgaagccctccacaatcactacacgcagaaatccctgtcgctctcaccagggaagggtgggggtggctcagggggtgggggatcaggtggtggtggtagcggaggtggagggagcggaggcggaggctccggtggaggaggttccggaggtggcgggtcagggggaggagggtcatgtccgccgtgccctgcccccgaattgctgggaggtccgtccgtatttctgtttcccccgaagcctaaagatactcttatgatctcgcgaacgccggaagtaacttgtgtcgtggtagatgtctcacacgaagatcccgaagtgaaattcaattggtatgtcgacggcgtggaggtacataacgccaagacgaagcctagagaggaacagtaccagtcaacgtatcgggtcgtatccgtgctcaccgtgctccaccaggattggctgaacggaaaggagtacaagtgcaaagtctcgaacaaggcgttgcctgcgccaatcgaaaagacgatctccaaagctaagggacaaccaagggaaccacaagtgtatactctcccgccctcgcgcgaagagatgacaaagaatcaggtgtcactttggtgcttggtgaaggggttctatccctcggatattgcggtcgagtgggagagcaatggtcaaccggagaacaattacaagacgacaccgcccgtattggactccgacgggtccttctttctctactcgaagctcactgtagataagtcgcgatggcagcaggggaacgtctttagctgttccgtgatgcacgaggcacttcataaccactatacccagaagtcgttgtcgctttcccccggaaaatgataa

SEQ ID NO: 293 - protein, 508 aa, Artificial Sequence
  source: /note="Description of Artificial Sequence: Synthetic polypeptide"
MGFGLSWLFLVAILKGVQCDKTHTCPPCPAPELLGGPSVFLFPPKPKDTLMISRTPEVTCVVVDVSHEDPEVKFNWYVDGVEVHNAKTKPREEQYQSTYRVVSVLTVLHQDWLNGKEYKCKVSNKALPAPIEKTISKAKGQPREPQVYTLPPSREEMTKNQVSLSCAVKGFYPSDIAVEWESNGQPENNYKTTPPVLDSDGSFFLVSKLTVDKSRWQQGNVFSCSVMHEALHNHYTQKSLSLSPGKGGGGSGGGGSGGGGSGGGGSGGGGSGGGGSGGGGSGGGGSCPPCPAPELLGGPSVFLFPPKPKDTLMISRTPEVTCVVVDVSHEDPEVKFNWYVDGVEVHNAKTKPREEQYQSTYRVVSVLTVLHQDWLNGKEYKCKVSNKALPAPIEKTISKAKGQPREPQVYTLPPSREEMTKNQVSLWCLVKGFYPSDIAVEWESNGQPENNYKTTPPVLDSDGSFFLYSKLTVDKSRWQQGNVFSCSVMHEALHNHYTQKSLSLSPGK

SEQ ID NO: 294 - DNA, 1530 bp, Artificial Sequence
  source: /note="Description of Artificial Sequence: Synthetic polynucleotide"
atgggcttcggactgtcgtggctttttctggtggcgattcttaagggggtccagtgcgataaaactcacacgtgccctccatgccctgctccggaacttctcgggggaccgtccgtattcctctttcctcctaagcctaaggacaccctcatgatcagcaggacccccgaggtgacgtgtgtagtcgtggatgtgtcccacgaggacccggaagtcaagttcaactggtatgtagatggagtggaggtccataatgccaagaccaagccaagagaggagcagtatcagtcgacttatcgggtggtcagcgtcctcacggtacttcatcaggattggctgaatggaaaggagtacaaatgtaaggtatccaacaaagcgttgccagcgcccatcgaaaagacaatctcgaaggcgaagggacaaccccgggaaccgcaagtgtgtaccctgccaccttcccgggaggagatgacgaaaaaccaggtatccctgtcgtgcgccgtgaaagggttttacccatcggatatcgcagtggagtgggaaagcaatgggcagccggaaaacaactataagaccacgccccctgtactcgactcggatgggtcctttttcctcgtcagcaaacttacggtagacaaaagcaggtggcaacaggggaatgtgttcagctgctcagtcatgcacgaggcactccataaccattacactcagaaatcactgtcgctgtcgcccggtaaagggggaggtgggtcgggcggtgggggaagcggtggtgggggatcaggtgggggaggttcgggaggtggtgggagcggtggaggcggttccggaggaggcgggtcgggtggaggtggatcgtgcccaccgtgccccgcaccggaactccttgggggaccatccgtgtttctgtttccaccgaagccaaaggacactctcatgatctcgcgcacaccagaggtgacatgtgtcgtcgtcgatgtgtcacacgaagatccagaggtcaagtttaactggtacgtggacggagtcgaggtccacaatgcgaaaacgaaacccagagaagagcagtaccagtcaacataccgggtggtgagcgtattgaccgtgcttcaccaggactggcttaacgggaaagagtacaagtgtaaggtcagcaataaggcgctcccagcgcctattgagaaaactatctcgaaagcaaaggggcagccacgagagccccaagtgtgtacgctgccaccctgtcgggaggaaatgaccaagaatcaagtctcgctttggtgccttgtgaagggattctatcccagcgacattgctgtagagtgggagtcgaacgggcaacccgagaataactacaagactactccgccggtgttggactcggacgggtcgttcttcctttatagcaaactcacagtcgacaagtccagatggcagcagggaaatgtcttttcctgctcggtaatgcacgaagcgttgcataaccactatacacagaagtcgctttcgttgtcacccgggaaatgataa

SEQ ID NO: 295 - protein, 508 aa, Artificial Sequence
  source: /note="Description of Artificial Sequence: Synthetic polypeptide"
MGFGLSWLFLVAILKGVQCDKTHTCPPCPAPELLGGPSVFLFPPKPKDTLMISRTPEVTCVVVDVSHEDPEVKFNWYVDGVEVHNAKTKPREEQYQSTYRVVSVLTVLHQDWLNGKEYKCKVSNKALPAPIEKTISKAKGQPREPQVCTLPPSREEMTKNQVSLSCAVKGFYPSDIAVEWESNGQPENNYKTTPPVLDSDGSFFLVSKLTVDKSRWQQGNVFSCSVMHEALHNHYTQKSLSLSPGKGGGGSGGGGSGGGGSGGGGSGGGGSGGGGSGGGGSGGGGSCPPCPAPELLGGPSVFLFPPKPKDTLMISRTPEVTCVVVDVSHEDPEVKFNWYVDGVEVHNAKTKPREEQYQSTYRVVSVLTVLHQDWLNGKEYKCKVSNKALPAPIEKTISKAKGQPREPQVCTLPPCREEMTKNQVSLWCLVKGFYPSDIAVEWESNGQPENNYKTTPPVLDSDGSFFLYSKLTVDKSRWQQGNVFSCSVMHEALHNHYTQKSLSLSPGK

SEQ ID NO: 296 - DNA, 1530 bp, Artificial Sequence
  source: /note="Description of Artificial Sequence: Synthetic polynucleotide"
atgggcttcggactgtcgtggctttttctggtggcgattcttaagggggtccagtgcgacaaaacgcacacttgtccgccgtgccctgccccagagttgcttggaggaccatcagtatttctcttccctcctaagccgaaagacacactcatgatctcacgcacaccggaagtaacttgcgtggtggtggatgtgtcgcatgaagatcccgaggtcaaattcaactggtacgtcgacggtgtggaggtgcacaacgccaagacgaaacccagagaagagcagtatcagtcgacctaccgagtggtatccgtgcttacggtgctgcatcaggattggttgaatggaaaagaatacaaatgcaaagtctcgaataaggcgctcccagccccaatcgaaaagacgatttccaaggcgaaggggcagcctcgggaacctcaggtctatacccttcctccgtcacgcgaggaaatgacaaagaatcaggtcagcctcacatgcctcgtgaagggattctatccgtcggatattgctgtcgagtgggaatcgaacggacagcccgagaacaattacaaaacaactcctcccgtacttgactcggacgggagctttttccttacgtcaaagctgaccgtcgataaaagcaggtggcagcaagggaatgtgttttcgtgctcggtcatgcacgaagcacttcataaccactacacccagaaatccttgagcctgtcaccggggaagggaggagggggtagcggcggtggagggagcggaggaggcgggtccggtgggggtgggtccgggggtggcggaagcggtggcggaggttcgggagggggaggaagcggagggggtggatcgtgtcctccgtgcccagcccccgaactcctcgggggaccctcggtattcctttttccgccgaaacccaaggacactttgatgattagccggacgcccgaggtgacatgcgtggtcgtggatgtatcgcatgaggaccccgaagtgaagttcaattggtacgtggatggggtggaagtccataacgcaaagaccaagcccagagaggagcagtaccaatcgacgtatagggtcgtgtccgtcctcacagtcttgcaccaggactggttgaacgggaaggagtataagtgtaaggtcagcaacaaagcgttgcctgcgcccattgaaaagactatctcaaaagcaaagggacagcccagggagccccaagtgtacacactgcccccgtcaagagaagaaatgaccaaaaatcaagtgtccctctactgcttggtgaaggggttctatcccagcgacatcgcggtagagtgggagtcaaatggccagcccgaaaacaactacaaaacgacaccgcccgtgttggattcggatgggtcattctttctgtattcaaaactgacagtggacaagtcgcggtggcaacaggggaacgtgttttcctgttccgtaatgcacgaggcgttgcacaatcactatacgcagaagtccctctcgctttcacccgggaagtgataa

SEQ ID NO: 297 - protein, 508 aa, Artificial Sequence
  source: /note="Description of Artificial Sequence: Synthetic polypeptide"
MGFGLSWLFLVAILKGVQCDKTHTCPPCPAPELLGGPSVFLFPPKPKDTLMISRTPEVTCVVVDVSHEDPEVKFNWYVDGVEVHNAKTKPREEQYQSTYRVVSVLTVLHQDWLNGKEYKCKVSNKALPAPIEKTISKAKGQPREPQVYTLPPSREEMTKNQVSLTCLVKGFYPSDIAVEWESNGQPENNYKTTPPVLDSDGSFFLTSKLTVDKSRWQQGNVFSCSVMHEALHNHYTQKSLSLSPGKGGGGSGGGGSGGGGSGGGGSGGGGSGGGGSGGGGSGGGGSCPPCPAPELLGGPSVFLFPPKPKDTLMISRTPEVTCVVVDVSHEDPEVKFNWYVDGVEVHNAKTKPREEQYQSTYRVVSVLTVLHQDWLNGKEYKCKVSNKALPAPIEKTISKAKGQPREPQVYTLPPSREEMTKNQVSLYCLVKGFYPSDIAVEWESNGQPENNYKTTPPVLDSDGSFFLYSKLTVDKSRWQQGNVFSCSVMHEALHNHYTQKSLSLSPGK

SEQ ID NO: 298 - DNA, 1530 bp, Artificial Sequence
  source: /note="Description of Artificial Sequence: Synthetic polynucleotide"
atgggcttcggactgtcgtggctttttctggtggcgattcttaagggggtccagtgcgataagacttgctgctgtcctccctgtccagcacccgagctgctcgggggaccctcggtgttcttgtttcctcccaaacccaaagatacccttatgattagccggacaccagaggtgacgtgcgtggtagtagacgtgtcccatgaggacccggaggtcaagttcaactggtacgtggacggagtggaggtgcacaatgcaaagaccaagccgagggaagagcaataccagtccacatatagagtcgtgtcggtccttacggtcttgcatcaggactggctgaatggcaaagaatacaaatgtaaagtctccaacaaagctctcccagcgcccattgagaaaacaatctcaaaagcgaaaggccaaccgagagaacctcaagtctatactcttcccccgtcgagagaggaaatgaccaaaaatcaggtatccctgtcatgcgcggtcaaggggttttacccaagcgacatcgccgtggagtgggagtcgaacggacagccagagaataactataagacgacccctcccgtgctggattcggatggatcgttctttcttgtcagcaaactcacagtcgacaaatcaaggtggcagcaagggaacgtgttcagctgttcggtaatgcatgaagccctccacaatcactacacgcagaaatccctgtcgctctcaccagggaagggtgggggtggctcagggggtgggggatcaggtggtggtggtagcggaggtggagggagcggaggcggaggctccggtggaggaggttccggaggtggcgggtcagggggaggagggtcatgtccgccgtgccctgcccccgaattgctgggaggtccgtccgtatttctgtttcccccgaagcctaaagatactcttatgatctcgcgaacgccggaagtaacttgtgtcgtggtagatgtctcacacgaagatcccgaagtgaaattcaattggtatgtcgacggcgtggaggtacataacgccaagacgaagcctagagaggaacagtaccagtcaacgtatcgggtcgtatccgtgctcaccgtgctccaccaggattggctgaacggaaaggagtacaagtgcaaagtctcgaacaaggcgttgcctgcgccaatcgaaaagacgatctccaaagctaagggacaaccaagggaaccacaagtgtatactctcccgccctcgcgcgaagagatgacaaagaatcaggtgtcactttggtgcttggtgaaggggttctatccctcggatattgcggtcgagtgggagagcaatggtcaaccggagaacaattacaagacgacaccgcccgtattggactccgacgggtccttctttctctactcgaagctcactgtagataagtcgcgatggcagcaggggaacgtctttagctgttccgtgatgcacgaggcacttcataaccactatacccagaagtcgttgtcgctttcccccggaaaatgataa

SEQ ID NO: 299 - protein, 508 aa, Artificial Sequence
  source: /note="Description of Artificial Sequence: Synthetic polypeptide"
MGFGLSWLFLVAILKGVQCDKTCCCPPCPAPELLGGPSVFLFPPKPKDTLMISRTPEVTCVVVDVSHEDPEVKFNWYVDGVEVHNAKTKPREEQYQSTYRVVSVLTVLHQDWLNGKEYKCKVSNKALPAPIEKTISKAKGQPREPQVYTLPPSREEMTKNQVSLSCAVKGFYPSDIAVEWESNGQPENNYKTTPPVLDSDGSFFLVSKLTVDKSRWQQGNVFSCSVMHEALHNHYTQKSLSLSPGKGGGGSGGGGSGGGGSGGGGSGGGGSGGGGSGGGGSGGGGSCPPCPAPELLGGPSVFLFPPKPKDTLMISRTPEVTCVVVDVSHEDPEVKFNWYVDGVEVHNAKTKPREEQYQSTYRVVSVLTVLHQDWLNGKEYKCKVSNKALPAPIEKTISKAKGQPREPQVYTLPPSREEMTKNQVSLWCLVKGFYPSDIAVEWESNGQPENNYKTTPPVLDSDGSFFLYSKLTVDKSRWQQGNVFSCSVMHEALHNHYTQKSLSLSPGK

SEQ ID NO: 300 - DNA, 1530 bp, Artificial Sequence
  source: /note="Description of Artificial Sequence: Synthetic polynucleotide"
atgggcttcggactgtcgtggctttttctggtggcgattcttaagggggtccagtgcgataagtgccacacatgccctccctgtccagcacccgagctgctcgggggaccctcggtgttcttgtttcctcccaaacccaaagatacccttatgattagccggacaccagaggtgacgtgcgtggtagtagacgtgtcccatgaggacccggaggtcaagttcaactggtacgtggacggagtggaggtgcacaatgcaaagaccaagccgagggaagagcaataccagtccacatatagagtcgtgtcggtccttacggtcttgcatcaggactggctgaatggcaaagaatacaaatgtaaagtctccaacaaagctctcccagcgcccattgagaaaacaatctcaaaagcgaaaggccaaccgagagaacctcaagtctatactcttcccccgtcgagagaggaaatgaccaaaaaccaggtatccctgtcatgcgcggtcaaggggttttacccaagcgacatcgccgtggagtgggagtcgaacggacagccagagaataactataagacgacccctcccgtgctggattcggatggatcgttctttcttgtcagcaaactcacagtcgacaaatcaaggtggcagcaagggaacgtgttcagctgttcggtaatgcatgaagccctccacaatcactacacgcagaaatccctgtcgctctcaccagggaagggtgggggtggctcagggggtgggggatcaggtggtggtggtagcggaggtggagggagcggaggcggaggctccggtggaggaggttccggaggtggcgggtcagggggaggagggtcatgtccgccgtgccctgcccccgaattgctgggaggtccgtccgtatttctgtttcccccgaagcctaaagatactcttatgatctcgcgaacgccggaagtaacttgtgtcgtggtagatgtctcacacgaagatcccgaagtgaaattcaattggtatgtcgacggcgtggaggtacataacgccaagacgaagcctagagaggaacagtaccagtcaacgtatcgggtcgtatccgtgctcaccgtgctccaccaggattggctgaacggaaaggagtacaagtgcaaagtctcgaacaaggcgttgcctgcgccaatcgaaaagacgatctccaaagctaagggacaaccaagggaaccacaagtgtatactctcccgccctcgcgcgaagagatgacaaagaatcaggtgtcactttggtgcttggtgaaggggttctatccctcggatattgcggtcgagtgggagagcaatggtcaaccggagaacaattacaagacgacaccgcccgtattggactccgacgggtccttctttctctactcgaagctcactgtagataagtcgcgatggcagcaggggaacgtctttagctgttccgtgatgcacgaggcacttcataaccactatacccagaagtcgttgtcgctttcccccggaaaatgataa

SEQ ID NO: 301 - protein, 508 aa, Artificial Sequence
  source: /note="Description of Artificial Sequence: Synthetic polypeptide"
MGFGLSWLFLVAILKGVQCDKCHTCPPCPAPELLGGPSVFLFPPKPKDTLMISRTPEVTCVVVDVSHEDPEVKFNWYVDGVEVHNAKTKPREEQYQSTYRVVSVLTVLHQDWLNGKEYKCKVSNKALPAPIEKTISKAKGQPREPQVYTLPPSREEMTKNQVSLSCAVKGFYPSDIAVEWESNGQPENNYKTTPPVLDSDGSFFLVSKLTVDKSRWQQGNVFSCSVMHEALHNHYTQKSLSLSPGKGGGGSGGGGSGGGGSGGGGSGGGGSGGGGSGGGGSGGGGSCPPCPAPELLGGPSVFLFPPKPKDTLMISRTPEVTCVVVDVSHEDPEVKFNWYVDGVEVHNAKTKPREEQYQSTYRVVSVLTVLHQDWLNGKEYKCKVSNKALPAPIEKTISKAKGQPREPQVYTLPPSREEMTKNQVSLWCLVKGFYPSDIAVEWESNGQPENNYKTTPPVLDSDGSFFLYSKLTVDKSRWQQGNVFSCSVMHEALHNHYTQKSLSLSPGK

SEQ ID NO: 302 - DNA, 1539 bp, Artificial Sequence
  source: /note="Description of Artificial Sequence: Synthetic polynucleotide"
atgggcttcggactgtcgtggctttttctggtggcgattcttaagggggtccagtgcgataaaacacacacatgcccaccatgcccagcgcctgaacttttgggaggtccctcggtgtttttgtttcctcctaagcctaaggacaccctgatgatctcccgcactccggaagtgacgtgtgtcgtagtcgacgtcagccatgaggaccctgaggtgaaattcaactggtacgtagatggtgtggaggtgcataatgcaaaaactaagcctcgggaggaacaatatcaaagcacataccgggtcgtgtccgtgctcacggtacttcatcaggattggctcaacgggaaagaatacaaatgtaaggtgtccaacaaggctctcccggcaccgattgagaaaacgatcagcaaggccaaggggcagccccgagaaccccaagtatacacacttcccccgtccagggaggagatgaccaagaaccaggtgtcgctgtcgtgtgcggtcaaggggttttatcccagcgacatcgcggtagagtgggagtcgaacggccagcccgagaacaactacaagacaacaccgcctgtattggactcggacgggtcgtttttcctggtcagcaagctcacagtggataaaagccgctggcagcaggggaatgtattctcctgctccgtcatgcacgaggcgcttcacaaccattacacgcaaaaatccctgtccttgtccaagtcatgcgacaagacgggaggaggagggtcaggcggaggaggaagcgggggtggagggtccggtggtggtgggagcggaggtggagggagcggtggaggtggtagcgggggaggtggatcgggagggggtgggagctgtccgccatgtccagccccggaacttctcgggggaccgtcagtctttctttttccgccgaagcccaaggacaccttgatgattagccgcacgccggaggtcacgtgcgtagtagtggatgtatcccacgaggaccccgaggtcaaattcaattggtatgtcgacggagtggaagtacacaacgcaaagacaaagccgagagaagagcagtaccaatccacttatagggtagtctcggtcttgacagtactgcaccaggactggcttaatggaaaggaatacaagtgcaaagtctcaaacaaagccctccccgcacccatcgaaaagacaatctcgaaagcgaaaggacagcccagagagcctcaagtgtataccctgcccccgtcaagagaagagatgacgaagaaccaagtgtccctctggtgtctcgtgaaaggtttttaccccagcgatattgccgtcgaatgggaaagcaatggtcagcccgaaaacaattacaagactacgcctcccgtattggattcggatggttcgttcttcttgtactcaaagcttactgtcgataagtcgcggtggcagcaaggcaatgtgtttagctgttcggtaatgcatgaggcgctccacaatcactatacacagaagagcttgtccctcagcggggagtgctgataa

SEQ ID NO: 303 - protein, 511 aa, Artificial Sequence
  source: /note="Description of Artificial Sequence: Synthetic polypeptide"
MGFGLSWLFLVAILKGVQCDKTHTCPPCPAPELLGGPSVFLFPPKPKDTLMISRTPEVTCVVVDVSHEDPEVKFNWYVDGVEVHNAKTKPREEQYQSTYRVVSVLTVLHQDWLNGKEYKCKVSNKALPAPIEKTISKAKGQPREPQVYTLPPSREEMTKNQVSLSCAVKGFYPSDIAVEWESNGQPENNYKTTPPVLDSDGSFFLVSKLTVDKSRWQQGNVFSCSVMHEALHNHYTQKSLSLSKSCDKTGGGGSGGGGSGGGGSGGGGSGGGGSGGGGSGGGGSGGGGSCPPCPAPELLGGPSVFLFPPKPKDTLMISRTPEVTCVVVDVSHEDPEVKFNWYVDGVEVHNAKTKPREEQYQSTYRVVSVLTVLHQDWLNGKEYKCKVSNKALPAPIEKTISKAKGQPREPQVYTLPPSREEMTKNQVSLWCLVKGFYPSDIAVEWESNGQPENNYKTTPPVLDSDGSFFLYSKLTVDKSRWQQGNVFSCSVMHEALHNHYTQKSLSLSGEC

SEQ ID NO: 304 - DNA, 1470 bp, Artificial Sequence
  source: /note="Description of Artificial Sequence: Synthetic polynucleotide"
atgggcttcggactgtcgtggctttttctggtggcgattcttaagggggtccagtgcgacaagacccacacctgcccaccgtgtccagcgcccgagctcctcggagggccgtcggtgttcctctttcccccaaagcctaaagacactctgatgatcagccgcactccagaagtgacatgtgtggtggtggatgtctcgcatgaggacccggaagtcaaattcaattggtacgtggatggtgtcgaagtgcacaacgccaagacaaaaccgcgcgaggagcagtaccagagcacctaccgggtggtatcagtgcttacagtactgcatcaggattggctgaacggaaaggagtacaagtgtaaagtcagcaacaaagcgctcccggctccgatcgagaaaacgatctcaaaggccaagggccagccgcgagaaccccaagtatacacgttgcccccttcaagggaggaaatgaccaagaatcaggtgtcactgagctgcgccgtcaagggattctacccctcggacattgcagtagagtgggagtcgaatgggcaacccgaaaacaactataagacgacacccccggtcctcgactcagatggatcgttcttccttgtatcaaaattgacggtcgacaagagccggtggcagcaaggtaacgtattttcgtgttcggtgatgcatgaagcgctgcataaccactatacgcagaagagcttgtccttgtcaccaggcaagggaggtgggggttcgggcggaggaggtagcggcggagggggtagcggaggtggcgggtcctgtcccccgtgccccgcaccggagctgctgggaggtccgtcagtgtttttgtttcctcccaagccgaaagacacgctgatgatctcgaggacgcccgaggtaacgtgcgtcgtcgtcgatgtatcccacgaagatcccgaggtcaagttcaactggtatgtagatggggtcgaagtccataacgctaagacaaagccgagagaggaacaatatcagtcaacttatcgggtcgtgtcggtcctgaccgtacttcaccaggactggctcaatgggaaagagtacaaatgcaaggtgtccaataaggcgctgcctgcgccaattgagaaaactatctcgaaagcgaagggacagcccagagagccgcaagtatatacactgccaccctcgagagaagaaatgacgaagaatcaagtctccttgtggtgtttggtgaaggggttttacccttcagacatcgcagtggaatgggaatcgaacgggcagccagaaaacaattacaaaaccacacctcctgtccttgactccgatggctcatttttcctctattcgaagctcactgtcgacaagtcgcgctggcagcagggtaacgtctttagctgctccgtgatgcacgaggccctccacaatcattatacacagaaatcgctgtcactttcgcccggaaaatgataa

SEQ ID NO: 305 - protein, 488 aa, Artificial Sequence
  source: /note="Description of Artificial Sequence: Synthetic polypeptide"
MGFGLSWLFLVAILKGVQCDKTHTCPPCPAPELLGGPSVFLFPPKPKDTLMISRTPEVTCVVVDVSHEDPEVKFNWYVDGVEVHNAKTKPREEQYQSTYRVVSVLTVLHQDWLNGKEYKCKVSNKALPAPIEKTISKAKGQPREPQVYTLPPSREEMTKNQVSLSCAVKGFYPSDIAVEWESNGQPENNYKTTPPVLDSDGSFFLVSKLTVDKSRWQQGNVFSCSVMHEALHNHYTQKSLSLSPGKGGGGSGGGGSGGGGSGGGGSCPPCPAPELLGGPSVFLFPPKPKDTLMISRTPEVTCVVVDVSHEDPEVKFNWYVDGVEVHNAKTKPREEQYQSTYRVVSVLTVLHQDWLNGKEYKCKVSNKALPAPIEKTISKAKGQPREPQVYTLPPSREEMTKNQVSLWCLVKGFYPSDIAVEWESNGQPENNYKTTPPVLDSDGSFFLYSKLTVDKSRWQQGNVFSCSVMHEALHNHYTQKSLSLSPGK

SEQ ID NO: 306 - DNA, 1524 bp, Artificial Sequence
  source: /note="Description of Artificial Sequence: Synthetic polynucleotide"
atgggcttcggactgtcgtggctttttctggtggcgattcttaagggggtccagtgcgacaaaacgcacacctgtccgccctgtcctgccccggaacttctcggagggccttccgtgtttctcttccctccgaagcccaaggacacgctgatgatctcccggaccccggaggtcacgtgtgtggtagtagacgtgtcacacgaagatccggaggtgaagttcaactggtacgtagatggcgtggaggtgcacaacgccaaaacgaagccccgagaggaacagtaccagtcaacgtaccgcgtcgtgtcggtattgactgtattgcatcaagactggttgaacgggaaggagtataagtgtaaagtcagcaacaaggctcttcccgcacccattgaaaagacaatttcgaaagccaaaggccagcccagggagccccaagtgtacaccctgccacccagccgggaagagatgacaaagaatcaagtctcgcttagctgcgctgtcaagggcttctatccatcggacattgcagtggaatgggaatcaaacggacagccggagaataactataagacgacaccccctgtcctcgacagcgacgggtcgttcttccttgtgagcaagctcacggtcgacaaaagccgctggcagcagggaaacgtattctcatgttcggtgatgcacgaagcattgcataaccactacacgcagaagagcttgtcgttgagcaaatcatgcgacaagaccgggggtggtgggagcggcggaggaggtagcggcggaggtggctcgggaggaggtgggtcgggtggtgggggaagcggaggcggagggagcggaggtggtgggtcatgtccgccgtgcccggcacccgaactgctcggaggtccctcggtgttcctgttcccgccaaagcctaaggatacgttgatgatttcgcgcacgccggaggtaacatgcgtggtggtggatgtgtcacatgaggaccccgaggtcaagttcaattggtacgtcgatggagtggaagtgcacaatgcgaaaacaaaaccccgggaggagcagtatcagagcacgtacagggtagtctccgtcctgactgtacttcaccaagactggcttaacggaaaagagtataagtgcaaggtcagcaacaaggcgcttcctgcccctatcgagaaaaccatctcgaaggccaagggacagccgagggagcctcaagtatacacgctgccgccatcgagagaagaaatgaccaaaaaccaggtgtccctttggtgtttggtgaagggtttctatccctccgatatcgccgtagagtgggagtcaaatggacagcctgagaacaactataagactacgccccctgtgttggacagcgatgggtcattctttctgtattcgaaactcacggtggataagtcgcgatggcaacagggcaatgtgttttcgtgcagcgtgatgcatgaggcgctgcacaaccactatactcagaaatcgttaagcttatcgggagagtgttgataa

SEQ ID NO: 307 - protein, 506 aa, Artificial Sequence
  source: /note="Description of Artificial Sequence: Synthetic polypeptide"
MGFGLSWLFLVAILKGVQCDKTHTCPPCPAPELLGGPSVFLFPPKPKDTLMISRTPEVTCVVVDVSHEDPEVKFNWYVDGVEVHNAKTKPREEQYQSTYRVVSVLTVLHQDWLNGKEYKCKVSNKALPAPIEKTISKAKGQPREPQVYTLPPSREEMTKNQVSLSCAVKGFYPSDIAVEWESNGQPENNYKTTPPVLDSDGSFFLVSKLTVDKSRWQQGNVFSCSVMHEALHNHYTQKSLSLSKSCDKTGGGGSGGGGSGGGGSGGGGSGGGGSGGGGSGGGGSCPPCPAPELLGGPSVFLFPPKPKDTLMISRTPEVTCVVVDVSHEDPEVKFNWYVDGVEVHNAKTKPREEQYQSTYRVVSVLTVLHQDWLNGKEYKCKVSNKALPAPIEKTISKAKGQPREPQVYTLPPSREEMTKNQVSLWCLVKGFYPSDIAVEWESNGQPENNYKTTPPVLDSDGSFFLYSKLTVDKSRWQQGNVFSCSVMHEALHNHYTQKSLSLSGEC

SEQ ID NO: 308 - DNA, 1524 bp, Artificial Sequence
  source: /note="Description of Artificial Sequence: Synthetic polynucleotide"
atgggcttcggactgtcgtggctttttctggtggcgattcttaagggggtccagtgcgacaaaacgcacacctgtccgccctgtcctgccccggaacttctcggagggccttccgtgtttctcttccctccgaagcccaaggacacgctgatgatctcccggaccccggaggtcacgtgtgtggtagtagacgtgtcacacgaagatccggaggtgaagttcaactggtacgtagatggcgtggaggtgcacaacgccaaaacgaagccccgagaggaacagtaccagtcaacgtaccgcgtcgtgtcggtattgactgtattgcatcaagactggttgaacgggaaggagtataagtgtaaagtcagcaacaaggctcttcccgcacccattgaaaagacaatttcgaaagccaaaggccagcccagggagccccaagtgtacaccctgccacccagccgggaagagatgacaaagaatcaagtctcgcttagctgcgctgtcaagggcttctatccatcggacattgcagtggaatgggaatcaaacggacagccggagaataactataagacgacaccccctgtcctcgacagcgacgggtcgttcttccttgtgagcaagctcacggtcgacaaaagccgctggcagcagggaaacgtattctcatgttcggtgatgcacgaagcattgcataaccactacacgcagaagagcttgtcgttgagcggggaatgcggagggggagggtccgggggtggtgggagcggcggaggaggtagcggcggaggtggctcgggaggaggtgggtcgggtggtgggggaagcggaggcggagggtcatgtccgccgtgcccggcacccgaactgctcggaggtccctcggtgttcctgttcccgccaaagcctaaggatacgttgatgatttcgcgcacgccggaggtaacatgcgtggtggtggatgtgtcacatgaggaccccgaggtcaagttcaattggtacgtcgatggagtggaagtgcacaatgcgaaaacaaaaccccgggaggagcagtatcagagcacgtacagggtagtctccgtcctgactgtacttcaccaagactggcttaacggaaaagagtataagtgcaaggtcagcaacaaggcgcttcctgcccctatcgagaaaaccatctcgaaggccaagggacagccgagggagcctcaagtatacacgctgccgccatcgagagaagaaatgaccaaaaaccaggtgtccctttggtgtttggtgaagggtttctatccctccgatatcgccgtagagtgggagtcaaatggacagcctgagaacaactataagactacgccccctgtgttggacagcgatgggtcattctttctgtattcgaaactcacggtggataagtcgcgatggcaacagggcaatgtgttttcgtgcagcgtgatgcatgaggcgctgcacaaccactatactcagaaatcgttaagcttatcgaagtcatgcgacaagacttgataa

SEQ ID NO: 309 - protein, 506 aa, Artificial Sequence
  source: /note="Description of Artificial Sequence: Synthetic polypeptide"
MGFGLSWLFLVAILKGVQCDKTHTCPPCPAPELLGGPSVFLFPPKPKDTLMISRTPEVTCVVVDVSHEDPEVKFNWYVDGVEVHNAKTKPREEQYQSTYRVVSVLTVLHQDWLNGKEYKCKVSNKALPAPIEKTISKAKGQPREPQVYTLPPSREEMTKNQVSLSCAVKGFYPSDIAVEWESNGQPENNYKTTPPVLDSDGSFFLVSKLTVDKSRWQQGNVFSCSVMHEALHNHYTQKSLSLSGECGGGGSGGGGSGGGGSGGGGSGGGGSGGGGSGGGGSCPPCPAPELLGGPSVFLFPPKPKDTLMISRTPEVTCVVVDVSHEDPEVKFNWYVDGVEVHNAKTKPREEQYQSTYRVVSVLTVLHQDWLNGKEYKCKVSNKALPAPIEKTISKAKGQPREPQVYTLPPSREEMTKNQVSLWCLVKGFYPSDIAVEWESNGQPENNYKTTPPVLDSDGSFFLYSKLTVDKSRWQQGNVFSCSVMHEALHNHYTQKSLSLSKSCDKT

SEQ ID NO: 310 - DNA, 1509 bp, Artificial Sequence
  source: /note="Description of Artificial Sequence: Synthetic polynucleotide"
atgggcttcggactgtcgtggctttttctggtggcgattcttaagggggtccagtgcgacaaaacgcacacctgtccgccctgtcctgccccggaacttctcggagggccttccgtgtttctcttccctccgaagcccaaggacacgctgatgatctcccggaccccggaggtcacgtgtgtggtagtagacgtgtcacacgaagatccggaggtgaagttcaactggtacgtagatggcgtggaggtgcacaacgccaaaacgaagccccgagaggaacagtaccagtcaacgtaccgcgtcgtgtcggtattgactgtattgcatcaagactggttgaacgggaaggagtataagtgtaaagtcagcaacaaggctcttcccgcacccattgaaaagacaatttcgaaagccaaaggccagcccagggagccccaagtgtacaccctgccacccagccgggaagagatgacaaagaatcaagtctcgcttagctgcgctgtcaagggcttctatccatcggacattgcagtggaatgggaatcaaacggacagccggagaataactataagacgacaccccctgtcctcgacagcgacgggtcgttcttccttgtgagcaagctcacggtcgacaaaagccgctggcagcagggaaacgtattctcatgttcggtgatgcacgaagcattgcataaccactacacgcagaagagcttgtcgttgagcaaatcatgcgacaagaccgggggtggtgggagcggcggaggaggtagcggcggaggtggctcgggaggaggtgggtcgggtggtgggggaagcggaggcggagggtcatgtccgccgtgcccggcacccgaactgctcggaggtccctcggtgttcctgttcccgccaaagcctaaggatacgttgatgatttcgcgcacgccggaggtaacatgcgtggtggtggatgtgtcacatgaggaccccgaggtcaagttcaattggtacgtcgatggagtggaagtgcacaatgcgaaaacaaaaccccgggaggagcagtatcagagcacgtacagggtagtctccgtcctgactgtacttcaccaagactggcttaacggaaaagagtataagtgcaaggtcagcaacaaggcgcttcctgcccctatcgagaaaaccatctcgaaggccaagggacagccgagggagcctcaagtatacacgctgccgccatcgagagaagaaatgaccaaaaaccaggtgtccctttggtgtttggtgaagggtttctatccctccgatatcgccgtagagtgggagtcaaatggacagcctgagaacaactataagactacgccccctgtgttggacagcgatgggtcattctttctgtattcgaaactcacggtggataagtcgcgatggcaacagggcaatgtgttttcgtgcagcgtgatgcatgaggcgctgcacaaccactatactcagaaatcgttaagcttatcgggagagtgttgataa

SEQ ID NO: 311 - protein, 501 aa, Artificial Sequence
  source: /note="Description of Artificial Sequence: Synthetic polypeptide"
MGFGLSWLFLVAILKGVQCDKTHTCPPCPAPELLGGPSVFLFPPKPKDTLMISRTPEVTCVVVDVSHEDPEVKFNWYVDGVEVHNAKTKPREEQYQSTYRVVSVLTVLHQDWLNGKEYKCKVSNKALPAPIEKTISKAKGQPREPQVYTLPPSREEMTKNQVSLSCAVKGFYPSDIAVEWESNGQPENNYKTTPPVLDSDGSFFLVSKLTVDKSRWQQGNVFSCSVMHEALHNHYTQKSLSLSKSCDKTGGGGSGGGGSGGGGSGGGGSGGGGSGGGGSCPPCPAPELLGGPSVFLFPPKPKDTLMISRTPEVTCVVVDVSHEDPEVKFNWYVDGVEVHNAKTKPREEQYQSTYRVVSVLTVLHQDWLNGKEYKCKVSNKALPAPIEKTISKAKGQPREPQVYTLPPSREEMTKNQVSLWCLVKGFYPSDIAVEWESNGQPENNYKTTPPVLDSDGSFFLYSKLTVDKSRWQQGNVFSCSVMHEALHNHYTQKSLSLSGEC

SEQ ID NO: 312 - DNA, 1494 bp, Artificial Sequence
  source: /note="Description of Artificial Sequence: Synthetic polynucleotide"
atgggcttcggactgtcgtggctttttctggtggcgattcttaagggggtccagtgcgacaaaacgcacacctgtccgccctgtcctgccccggaacttctcggagggccttccgtgtttctcttccctccgaagcccaaggacacgctgatgatctcccggaccccggaggtcacgtgtgtggtagtagacgtgtcacacgaagatccggaggtgaagttcaactggtacgtagatggcgtggaggtgcacaacgccaaaacgaagccccgagaggaacagtaccagtcaacgtaccgcgtcgtgtcggtattgactgtattgcatcaagactggttgaacgggaaggagtataagtgtaaagtcagcaacaaggctcttcccgcacccattgaaaagacaatttcgaaagccaaaggccagcccagggagccccaagtgtacaccctgccacccagccgggaagagatgacaaagaatcaagtctcgcttagctgcgctgtcaagggcttctatccatcggacattgcagtggaatgggaatcaaacggacagccggagaataactataagacgacaccccctgtcctcgacagcgacgggtcgttcttccttgtgagcaagctcacggtcgacaaaagccgctggcagcagggaaacgtattctcatgttcggtgatgcacgaagcattgcataaccactacacgcagaagagcttgtcgttgagcaaatcatgcgacaagaccgggggtggtgggagcggcggaggaggtagcggcggaggtggctcgggaggaggtgggtcgggtggtgggggatcatgtccgccgtgcccggcacccgaactgctcggaggtccctcggtgttcctgttcccgccaaagcctaaggatacgttgatgatttcgcgcacgccggaggtaacatgcgtggtggtggatgtgtcacatgaggaccccgaggtcaagttcaattggtacgtcgatggagtggaagtgcacaatgcgaaaacaaaaccccgggaggagcagtatcagagcacgtacagggtagtctccgtcctgactgtacttcaccaagactggcttaacggaaaagagtataagtgcaaggtcagcaacaaggcgcttcctgcccctatcgagaaaaccatctcgaaggccaagggacagccgagggagcctcaagtatacacgctgccgccatcgagagaagaaatgaccaaaaaccaggtgtccctttggtgtttggtgaagggtttctatccctccgatatcgccgtagagtgggagtcaaatggacagcctgagaacaactataagactacgccccctgtgttggacagcgatgggtcattctttctgtattcgaaactcacggtggataagtcgcgatggcaacagggcaatgtgttttcgtgcagcgtgatgcatgaggcgctgcacaaccactatactcagaaatcgttaagcttatcgggagagtgttgataa

SEQ ID NO: 313 - protein, 496 aa, Artificial Sequence
  source: /note="Description of Artificial Sequence: Synthetic polypeptide"
MGFGLSWLFLVAILKGVQCDKTHTCPPCPAPELLGGPSVFLFPPKPKDTLMISRTPEVTCVVVDVSHEDPEVKFNWYVDGVEVHNAKTKPREEQYQSTYRVVSVLTVLHQDWLNGKEYKCKVSNKALPAPIEKTISKAKGQPREPQVYTLPPSREEMTKNQVSLSCAVKGFYPSDIAVEWESNGQPENNYKTTPPVLDSDGSFFLVSKLTVDKSRWQQGNVFSCSVMHEALHNHYTQKSLSLSKSCDKTGGGGSGGGGSGGGGSGGGGSGGGGSCPPCPAPELLGGPSVFLFPPKPKDTLMISRTPEVTCVVVDVSHEDPEVKFNWYVDGVEVHNAKTKPREEQYQSTYRVVSVLTVLHQDWLNGKEYKCKVSNKALPAPIEKTISKAKGQPREPQVYTLPPSREEMTKNQVSLWCLVKGFYPSDIAVEWESNGQPENNYKTTPPVLDSDGSFFLYSKLTVDKSRWQQGNVFSCSVMHEALHNHYTQKSLSLSGEC

SEQ ID NO: 314 - DNA, 1539 bp, Artificial Sequence
  source: /note="Description of Artificial Sequence: Synthetic polynucleotide"
atgggcttcggactgtcgtggctttttctggtggcgattcttaagggggtccagtgcgacaaaacgcacacttgtccgccctgccctgcgcccgaactgcttggaggcccttcggtgtttttgtttccgcccaagcctaaggacaccttgatgatcagccggacaccggaggtcacatgtgtcgtcgtggatgtctcgcacgaggatcccgaggtcaagtttaactggtatgtggatggagtggaggtccacaacgccaaaaccaagcccagggaggagcaataccagtcaacctatcgggtagtctcggtgctgacggtactgcaccaggactggttgaatggaaaagagtacaaatgcaaggtatcaaacaaggcccttcccgctcccatcgaaaagacgatcagcaaagcgaaagggcaacccagagagccccaagtctatacgctgcctccctcaagggaagaaatgacgaaaaaccaggtgcacttgacatgcctcgtgaaaggcttctacccgagcgacattgcggtggaatgggagtcaaatggtcagccggaaaacaactacaagacaactccaccggtccttgattcagacgggtcgttcgccctctatagcaaactcacggtcgacaagtcccgctggcagcagggtaacgtgttttcgtgttcagtgatgcacgaggctctgcataatcactacacacagaagtccctctccttgagcaaaagctgcgacaagacagggggtggaggttcaggcggtggtgggtcgggagggggagggtcaggtggaggcggcagcgggggtgggggatcgggaggaggagggtccgggggagggggttccggagggggtgggtcctgtcccccttgtccagcgccggagctgttgggcggaccttcggtattcttgtttcctcctaagcccaaagatacgcttatgatctcccgcaccccggaggtaacttgcgtcgtagtggatgtatcacatgaggacccagaagtcaagttcaattggtacgtggacggagtcgaagtccataacgctaaaacgaaaccgagagaggaacagtatcagagcacctaccgggtagtgagcgtgctcacagtgttgcatcaggattggctgaatgggaaggaatacaagtgcaaagtgtcgaataaggcattgccagcaccgattgagaaaacaatctcaaaagcgaagggacagccccgagagcctcaagtcactacactgccacccagccgcgaagagatgacaaagaatcaggtatccctcacgtgtcttgtgaaggggttctatccctccgatatcgcagtagagtgggaatcgaacgggcagccggagaacaattacaagactttcccgccagtgcttgattcggacggtagcttctttttgtattcgaagctcacggtagataagtcgaggtggcaacaaggaaatgtgttttcatgttcggtgatgcatgaagcgctccataaccactatacgcagaaatcgctttcgctctccggtgaatgctgataa

SEQ ID NO: 315 - protein, 511 aa, Artificial Sequence
  source: /note="Description of Artificial Sequence: Synthetic polypeptide"
MGFGLSWLFLVAILKGVQCDKTHTCPPCPAPELLGGPSVFLFPPKPKDTLMISRTPEVTCVVVDVSHEDPEVKFNWYVDGVEVHNAKTKPREEQYQSTYRVVSVLTVLHQDWLNGKEYKCKVSNKALPAPIEKTISKAKGQPREPQVYTLPPSREEMTKNQVHLTCLVKGFYPSDIAVEWESNGQPENNYKTTPPVLDSDGSFALYSKLTVDKSRWQQGNVFSCSVMHEALHNHYTQKSLSLSKSCDKTGGGGSGGGGSGGGGSGGGGSGGGGSGGGGSGGGGSGGGGSCPPCPAPELLGGPSVFLFPPKPKDTLMISRTPEVTCVVVDVSHEDPEVKFNWYVDGVEVHNAKTKPREEQYQSTYRVVSVLTVLHQDWLNGKEYKCKVSNKALPAPIEKTISKAKGQPREPQVTTLPPSREEMTKNQVSLTCLVKGFYPSDIAVEWESNGQPENNYKTFPPVLDSDGSFFLYSKLTVDKSRWQQGNVFSCSVMHEALHNHYTQKSLSLSGEC

SEQ ID NO: 316 - DNA, 1539 bp, Artificial Sequence
  source: /note="Description of Artificial Sequence: Synthetic polynucleotide"
atgggcttcggactgtcgtggctttttctggtggcgattcttaagggggtccagtgcgacaaaacgcacacttgtccgccgtgcccagcgcccgagttgcttggcggacccagcgtgtttttgtttcccccgaaaccgaaagatacattgatgattagcagaacgcccgaagtgacgtgtgtagtagtcgacgtgtcgcacgaagatccggaggtgaagttcaactggtatgtcgatggggtagaggtgcacaacgcgaaaaccaagcccagggaggagcagtaccagtcgacatatcgggtcgtgtcagtgctgacagtgctccatcaggactggttgaacgggaaggagtataagtgtaaagtcagcaacaaagccctccccgcacccatcgagaaaaccatttccaaggcaaagggacaaccgagggaaccacaagtctacactctcccaccctcccgcgaagaaatgacgaaaaaccaagtgtcactgacgtgtcttgtagatggtttctacccctcggacatcgcggtcgaatgggagtcgaatggacagccggagaacaattacgataccacacctcctgtcttggattcggacggctcattcttcctttacagcgatctcactgtcgacaagtcgcgctggcagcagggaaacgtcttttcctgttcggtaatgcacgaagctctgcacaatcactacacgcagaagtcgctttcactttccaaaagctgcgacaagacagggggtggaggttcaggcggtggtgggtcgggagggggagggtcaggtggaggcggcagcgggggtgggggatcgggaggaggagggtccgggggagggggttccggagggggtgggtcctgtcccccttgtccagcgccggagctgttgggcggaccttcggtattcttgtttcctcctaagcccaaagatacgcttatgatctcccgcaccccggaggtaacttgcgtcgtagtggatgtatcacatgaggacccagaagtcaagttcaattggtacgtggacggagtcgaagtccataacgctaaaacgaaaccgagagaggaacagtatcagagcacctaccgggtagtgagcgtgctcacagtgttgcatcaggattggctgaatgggaaggaatacaagtgcaaagtgtcgaataaggcattgccagcaccgattgagaaaacaatctcaaaagcgaagggacagccccgagagcctcaagtctatacactgccgccaagccggaagaagatgaccaaaaaccaggtgtccctcacgtgcctcgtgaaagggttttacccgtcagatatcgccgtagaatgggagagcaatgggcagcccgagaataactataagactacgccccctgtactcaaatcggacgggtcattctttctgtattcgaagctcacggtagataagtcgaggtggcaacaaggaaatgtgttttcatgttcggtgatgcatgaagcgctccataaccactatacgcagaaatcgctttcgctctccggtgaatgctgataa

SEQ ID NO: 317 - protein, 511 aa, Artificial Sequence
  source: /note="Description of Artificial Sequence: Synthetic polypeptide"
MGFGLSWLFLVAILKGVQCDKTHTCPPCPAPELLGGPSVFLFPPKPKDTLMISRTPEVTCVVVDVSHEDPEVKFNWYVDGVEVHNAKTKPREEQYQSTYRVVSVLTVLHQDWLNGKEYKCKVSNKALPAPIEKTISKAKGQPREPQVYTLPPSREEMTKNQVSLTCLVDGFYPSDIAVEWESNGQPENNYDTTPPVLDSDGSFFLYSDLTVDKSRWQQGNVFSCSVMHEALHNHYTQKSLSLSKSCDKTGGGGSGGGGSGGGGSGGGGSGGGGSGGGGSGGGGSGGGGSCPPCPAPELLGGPSVFLFPPKPKDTLMISRTPEVTCVVVDVSHEDPEVKFNWYVDGVEVHNAKTKPREEQYQSTYRVVSVLTVLHQDWLNGKEYKCKVSNKALPAPIEKTISKAKGQPREPQVYTLPPSRKKMTKNQVSLTCLVKGFYPSDIAVEWESNGQPENNYKTTPPVLKSDGSFFLYSKLTVDKSRWQQGNVFSCSVMHEALHNHYTQKSLSLSGEC

SEQ ID NO: 318 - DNA, 1530 bp, Artificial Sequence
  source: /note="Description of Artificial Sequence: Synthetic polynucleotide"
atgggcttcggactgtcgtggctttttctggtggcgattcttaagggggtccagtgcgacaagacccatacatgcccaagctgtcccgctccggagtttctcggtggaccgtcggtgtttctgttccctccgaagccaaaagataccttgatgatttcgcgaactcccgaagtcacgtgtgtcgtcgtggacgtaagccaggaggacccggaggtccagttcaattggtatgtagacggcgtagaggtacataatgcgaaaacgaagcccagagaggaacagttcaatagcaaataccgcgtagtatcggtgctgacagtgttgcaccaggactggctgaatggaaaagaatacaagtgtaaagtgtccaacaagggccttccatcgtcgattgaaaagacaatctccaaggcaaaggggcagcctagggagccccaagtctacaccctgcccccttcgcgggaggagatgacgaagaaccaggtatcactgtcatgcgcggtcaaaggattttacccgagcgacatcgccgtagaatgggagtccaacggacagccagaaaacaattacaagaccactcctccagtgctcgatagcgatggctccttctttcttgtcagcaaattgacagtcgataagtcaagatggcagcagggtaatgtgttctcatgtagcgtcatgcacgaagcactccacaatcattatacacagaagagcctctcgttgtcgcccggaaaaggcggaggtgggtcgggcggagggggaagcggtggaggagggtcaggaggtggaggttccgggggaggcggttcgggaggagggggttcgggtggtggaggatcgggtggcggaggaagctgcccttcatgtccagcccccgagttcctcggaggcccgtcggtctttctttttccccctaagcctaaagataccctgatgatcagccggacgcctgaggtgacttgtgtggtagtcgacgtgtcccaagaagatccggaagtccagtttaactggtatgtggatggagtggaggtccataatgccaagacaaagccaagggaggagcaattcaactcgaagtaccgcgtcgtgtccgtgctcacagtgcttcatcaagactggttgaacggaaaggagtacaaatgtaaggtatcaaacaagggtttgccctcgtccatcgagaaaaccatctcgaaagcgaaagggcaaccccgcgagccccaggtatatacgctcccgccttcaagagaagaaatgacgaaaaaccaagtgagcttgtggtgcctggtcaaggggttctatccctccgatatcgcggtagagtgggaaagcaatgggcagccggagaacaactataagacaacgcctcccgtgttggactcagatggatcgttcttcttgtactcaaagcttacggtggacaagtcacgctggcagcaagggaacgtgttttcgtgctcggtgatgcacgaggcgcttcacaatcactacactcagaaatcgcttagcttgtcaccaggaaaatgataa

SEQ ID NO: 319 - protein, 508 aa, Artificial Sequence
  source: /note="Description of Artificial Sequence: Synthetic polypeptide"
MGFGLSWLFLVAILKGVQCDKTHTCPSCPAPEFLGGPSVFLFPPKPKDTLMISRTPEVTCVVVDVSQEDPEVQFNWYVDGVEVHNAKTKPREEQFNSKYRVVSVLTVLHQDWLNGKEYKCKVSNKGLPSSIEKTISKAKGQPREPQVYTLPPSREEMTKNQVSLSCAVKGFYPSDIAVEWESNGQPENNYKTTPPVLDSDGSFFLVSKLTVDKSRWQQGNVFSCSVMHEALHNHYTQKSLSLSPGKGGGGSGGGGSGGGGSGGGGSGGGGSGGGGSGGGGSGGGGSCPSCPAPEFLGGPSVFLFPPKPKDTLMISRTPEVTCVVVDVSQEDPEVQFNWYVDGVEVHNAKTKPREEQFNSKYRVVSVLTVLHQDWLNGKEYKCKVSNKGLPSSIEKTISKAKGQPREPQVYTLPPSREEMTKNQVSLWCLVKGFYPSDIAVEWESNGQPENNYKTTPPVLDSDGSFFLYSKLTVDKSRWQQGNVFSCSVMHEALHNHYTQKSLSLSPGK

SEQ ID NO: 320 - DNA, 1530 bp, Artificial Sequence
  source: /note="Description of Artificial Sequence: Synthetic polynucleotide"
atgggcttcggactgtcgtggctttttctggtggcgattcttaagggggtccagtgcgataagacacacacgtgcccctcgtgccccgcaccggagttccttgggggtccgtcggtctttttgtttccccctaaacccaaggacacgctcatgatctcccgcacaccggaagtcacgtgcgtagtcgtggatgtctcacaagaggacccggaagtgcaattcaactggtacgtcgacggcgtggaggtgcacaatgccaagacgaaaccaagagaggaacagttcaactcaaagtaccgggtagtatcggtgttgacggtgctccatcaggattggcttaacggtaaagagtacaagtgtaaagtcagcaataagggtctgcccagctccatcgaaaagactatctccaaggccaaggggcagcctcgcgaaccgcaagtgtgtacgttgcccccgtcccgggaggagatgacgaaaaatcaggtcagcctctcgtgtgcggtgaaggggttttacccatccgacattgcggtggaatgggagagcaacggacagcccgaaaacaattacaagactaccccgccagtactcgatagcgacgggtcgttctttcttgtgtcgaaactgacagtggacaagtcaagatggcagcaaggaaatgtgttctcgtgtagcgtgatgcacgaggcactccacaatcattacacacagaagagcttgtccctctcccctggtaaaggaggaggagggtcgggtgggggaggcagcgggggaggaggatcaggaggtgggggttcaggcggagggggttcgggtggtgggggatcgggaggtggaggttcgggaggagggggctcctgtccgagctgccccgctcccgagttcttgggaggtccctcagtgtttcttttcccgccgaagcctaaagatacactgatgatttcacgaacccccgaagtgacatgcgtagtagtagatgtgtcgcaagaagatccggaagtccagttcaattggtatgtggatggggtggaggtccataatgcgaaaacaaaaccgcgggaagagcaattcaattcaaagtatagggtcgtcagcgtgctcacagtgctgcaccaggactggcttaatgggaaagaatacaagtgcaaggtatccaacaaggggttgccctcgtcgatcgagaaaacgatttcaaaagccaagggacaaccgagggaaccacaagtatgcacgctgccgccgtgtagggaagaaatgacgaagaaccaagtgagcctctggtgcctggtgaagggcttttatccctccgacatcgcagtcgagtgggaatcgaatgggcagccggagaacaactataagactactcccccagtgttggattcggatggatcatttttcctctactcgaaacttacggtcgacaaatcacgctggcagcagggcaacgtgttttcctgctcggtaatgcatgaggcgcttcacaaccactatacccagaagtcactgtcgcttagcccagggaaatgataa

SEQ ID NO: 321 - protein, 508 aa, Artificial Sequence
  source: /note="Description of Artificial Sequence: Synthetic polypeptide"
MGFGLSWLFLVAILKGVQCDKTHTCPSCPAPEFLGGPSVFLFPPKPKDTLMISRTPEVTCVVVDVSQEDPEVQFNWYVDGVEVHNAKTKPREEQFNSKYRVVSVLTVLHQDWLNGKEYKCKVSNKGLPSSIEKTISKAKGQPREPQVCTLPPSREEMTKNQVSLSCAVKGFYPSDIAVEWESNGQPENNYKTTPPVLDSDGSFFLVSKLTVDKSRWQQGNVFSCSVMHEALHNHYTQKSLSLSPGKGGGGSGGGGSGGGGSGGGGSGGGGSGGGGSGGGGSGGGGSCPSCPAPEFLGGPSVFLFPPKPKDTLMISRTPEVTCVVVDVSQEDPEVQFNWYVDGVEVHNAKTKPREEQFNSKYRVVSVLTVLHQDWLNGKEYKCKVSNKGLPSSIEKTISKAKGQPREPQVCTLPPCREEMTKNQVSLWCLVKGFYPSDIAVEWESNGQPENNYKTTPPVLDSDGSFFLYSKLTVDKSRWQQGNVFSCSVMHEALHNHYTQKSLSLSPGK

SEQ ID NO: 322 - DNA, 1530 bp, Artificial Sequence
  source: /note="Description of Artificial Sequence: Synthetic polynucleotide"
atgggcttcggactgtcgtggctttttctggtggcgattcttaagggggtccagtgcgacaagacccatacgtgcccatcgtgccccgcaccggagttcctcggaggcccgtcagtattcctttttcctccgaagcccaaagatacattgatgatcagcaggacgcctgaagtgacatgtgtagtggtagacgtgtcgcaagaagatccagaggtacagtttaactggtatgtcgacggggtggaagtccataacgccaagactaaaccccgcgaagagcagttcaactcaaagtatagagtagtctccgtcctgacagtcctccatcaggactggctgaacgggaaagaatacaagtgcaaagtctcgaacaaagggcttccgtcatcgatcgagaaaacgatttcaaaagccaagggacagcctagggagccgcaagtgtatactctgcccccgtcgcgcgaggagatgacgaaaaatcaggtgtccctcacgtgcctcgtcaaaggattttacccgtcggatatcgccgtggagtgggaatcgaatgggcaaccagagaacaactacaagaccactcccccggtgctggactcggacggctcctttttcttgacatcaaagctcacagtcgataagagccgctggcaacaagggaatgtgttcagctgctcggtgatgcacgaagcgctgcacaaccactatacccagaaatcattgtccctcagccccggaaagggaggtggagggtccggtgggggtggatcaggagggggtgggagcggaggaggcggcagcggtggcggagggtcaggtggaggcggatcaggtgggggaggttcaggcggtgggggctcgtgccccagctgtcctgctcccgagtttctcgggggaccttcagtctttctcttccctccgaaacccaaggacacgctgatgatttcgcggacacccgaagtgacttgtgtcgtggtcgacgtaagccaggaggaccccgaggtgcaattcaactggtacgtcgacggagtcgaggtccacaatgcgaaaacaaaacccagagaagaacagttcaattcgaaatatcgagtggtatcagtcctgaccgtgcttcatcaggattggctcaatgggaaagagtacaaatgcaaggtatcaaacaagggactgccaagctcaatcgaaaagactatctcgaaagcaaagggtcagcctcgggagccccaagtgtacacgcttcccccatccagggaagaaatgacgaagaaccaggtgtcgctctactgtttggtgaaggggttttatccttcggacatcgcggtggaatgggagtcgaatggacagccggagaataactacaaaacgactccgcctgtcctcgacagcgatgggtccttcttcctttactcaaaattgacagtagataagtcgcgctggcagcagggaaatgtattctcctgttccgtcatgcatgaggcgcttcacaatcactacactcagaagtccttgtcgttgtcaccaggaaaatgataa

SEQ ID NO: 323 - protein, 508 aa, Artificial Sequence
  source: /note="Description of Artificial Sequence: Synthetic polypeptide"
MGFGLSWLFLVAILKGVQCDKTHTCPSCPAPEFLGGPSVFLFPPKPKDTLMISRTPEVTCVVVDVSQEDPEVQFNWYVDGVEVHNAKTKPREEQFNSKYRVVSVLTVLHQDWLNGKEYKCKVSNKGLPSSIEKTISKAKGQPREPQVYTLPPSREEMTKNQVSLTCLVKGFYPSDIAVEWESNGQPENNYKTTPPVLDSDGSFFLTSKLTVDKSRWQQGNVFSCSVMHEALHNHYTQKSLSLSPGKGGGGSGGGGSGGGGSGGGGSGGGGSGGGGSGGGGSGGGGSCPSCPAPEFLGGPSVFLFPPKPKDTLMISRTPEVTCVVVDVSQEDPEVQFNWYVDGVEVHNAKTKPREEQFNSKYRVVSVLTVLHQDWLNGKEYKCKVSNKGLPSSIEKTISKAKGQPREPQVYTLPPSREEMTKNQVSLYCLVKGFYPSDIAVEWESNGQPENNYKTTPPVLDSDGSFFLYSKLTVDKSRWQQGNVFSCSVMHEALHNHYTQKSLSLSPGK

SEQ ID NO: 324 - DNA, 1530 bp, Artificial Sequence
  source: /note="Description of Artificial Sequence: Synthetic polynucleotide"
atgggcttcggactgtcgtggctttttctggtggcgattcttaagggggtccagtgcgacaagacatgctgttgcccaagctgtcccgctccggagtttctcggtggaccgtcggtgtttctgttccctccgaagccaaaagataccttgatgatttcgcgaactcccgaagtcacgtgtgtcgtcgtggacgtaagccaggaggacccggaggtccagttcaattggtatgtagacggcgtagaggtacataatgcgaaaacgaagcccagagaggaacagttcaatagcaaataccgcgtagtatcggtgctgacagtgttgcaccaggactggctgaatggaaaagaatacaagtgtaaagtgtccaacaagggccttccatcgtcgattgaaaagacaatctccaaggcaaaggggcagcctagggagccccaagtctacaccctgcccccttcgcgggaggagatgacgaagaaccaggtatcactgtcatgcgcggtcaaaggattttacccgagcgacatcgccgtagaatgggagtccaacggacagccagaaaacaattacaagaccactcctccagtgctcgatagcgatggctccttctttcttgtcagcaaattgacagtcgataagtcaagatggcagcagggtaatgtgttctcatgtagcgtcatgcacgaagcactccacaatcattatacacagaagagcctctcgttgtcgcccggaaaaggcggaggtgggtcgggcggagggggaagcggtggaggagggtcaggaggtggaggttccgggggaggcggttcgggaggagggggttcgggtggtggaggatcgggtggcggaggaagctgcccttcatgtccagcccccgagttcctcggaggcccgtcggtctttctttttccccctaagcctaaagataccctgatgatcagccggacgcctgaggtgacttgtgtggtagtcgacgtgtcccaagaagatccggaagtccagtttaactggtatgtggatggagtggaggtccataatgccaagacaaagccaagggaggagcaattcaactcgaagtaccgcgtcgtgtccgtgctcacagtgcttcatcaagactggttgaacggaaaggagtacaaatgtaaggtatcaaacaagggtttgccctcgtccatcgagaaaaccatctcgaaagcgaaagggcaaccccgcgagccccaggtatatacgctcccgccttcaagagaagaaatgactaaaaaccaagtgagcttgtggtgcctggtcaaggggttctatccctccgatatcgcggtagagtgggaaagcaatgggcagccggagaacaactataagacaacgcctcccgtgttggactcagatggatcgttcttcttgtactcaaagcttacggtggacaagtcacgctggcagcaagggaacgtgttttcgtgctcggtgatgcacgaggcgcttcacaatcactacactcagaaatcgcttagcttgtcaccaggaaaatgataa

SEQ ID NO: 325 - protein, 508 aa, Artificial Sequence
  source: /note="Description of Artificial Sequence: Synthetic polypeptide"
MGFGLSWLFLVAILKGVQCDKTCCCPSCPAPEFLGGPSVFLFPPKPKDTLMISRTPEVTCVVVDVSQEDPEVQFNWYVDGVEVHNAKTKPREEQFNSKYRVVSVLTVLHQDWLNGKEYKCKVSNKGLPSSIEKTISKAKGQPREPQVYTLPPSREEMTKNQVSLSCAVKGFYPSDIAVEWESNGQPENNYKTTPPVLDSDGSFFLVSKLTVDKSRWQQGNVFSCSVMHEALHNHYTQKSLSLSPGKGGGGSGGGGSGGGGSGGGGSGGGGSGGGGSGGGGSGGGGSCPSCPAPEFLGGPSVFLFPPKPKDTLMISRTPEVTCVVVDVSQEDPEVQFNWYVDGVEVHNAKTKPREEQFNSKYRVVSVLTVLHQDWLNGKEYKCKVSNKGLPSSIEKTISKAKGQPREPQVYTLPPSREEMTKNQVSLWCLVKGFYPSDIAVEWESNGQPENNYKTTPPVLDSDGSFFLYSKLTVDKSRWQQGNVFSCSVMHEALHNHYTQKSLSLSPGK

SEQ ID NO: 326 - DNA, 1530 bp, Artificial Sequence
  source: /note="Description of Artificial Sequence: Synthetic polynucleotide"
atgggcttcggactgtcgtggctttttctggtggcgattcttaagggggtccagtgcgacaagtgccatacatgcccaagctgtcccgctccggagtttctcggtggaccgtcggtgtttctgttccctccgaagccaaaagataccttgatgatttcgcgaactcccgaagtcacgtgtgtcgtcgtggacgtaagccaggaggacccggaggtccagttcaattggtatgtagacggcgtagaggtacataatgcgaaaacgaagcccagagaggaacagttcaatagcaaataccgcgtagtatcggtgctgacagtgttgcaccaggactggctgaatggaaaagaatacaagtgtaaagtgtccaacaagggccttccatcgtcgattgaaaagacaatctccaaggcaaaggggcagcctagggagccccaagtctacaccctgcccccttcgcgggaggagatgacgaagaaccaggtatcactgtcatgcgcggtcaaaggattttacccgagcgacatcgccgtagaatgggagtccaacggacagccagaaaacaattacaagaccactcctccagtgctcgatagcgatggctccttctttcttgtcagcaaattgacagtcgataagtcaagatggcagcagggtaatgtgttctcatgtagcgtcatgcacgaagcactccacaatcattatacacagaagagcctctcgttgtcgcccggaaaaggcggaggtgggtcgggcggagggggaagcggtggaggagggtcaggaggtggaggttccgggggaggcggttcgggaggagggggttcgggtggtggaggatcgggtggcggaggaagctgcccttcatgtccagcccccgagttcctcggaggcccgtcggtctttctttttccccctaagcctaaagataccctgatgatcagccggacgcctgaggtgacttgtgtggtagtcgacgtgtcccaagaagatccggaagtccagtttaactggtatgtggatggagtggaggtccataatgccaagacaaagccaagggaggagcaattcaactcgaagtaccgcgtcgtgtccgtgctcacagtgcttcatcaagactggttgaacggaaaggagtacaaatgtaaggtatcaaacaagggtttgccctcgtccatcgagaaaaccatctcgaaagcgaaagggcaaccccgcgagccccaggtatatacgctcccgccttcaagagaagaaatgacgaaaaaccaagtgagcttgtggtgcctggtcaaggggttctatccctccgatatcgcggtagagtgggaaagcaatgggcagccggagaacaactataagacaacgcctcccgtgttggactcagatggatcgttcttcttgtactcaaagcttacggtggacaagtcacgctggcagcaagggaacgtgttttcgtgctcggtgatgcacgaggcgcttcacaatcactacactcagaaatcgcttagcttgtcaccaggaaaatgataa

SEQ ID NO: 327 - protein, 508 aa, Artificial Sequence
  source: /note="Description of Artificial Sequence: Synthetic polypeptide"
MGFGLSWLFLVAILKGVQCDKCHTCPSCPAPEFLGGPSVFLFPPKPKDTLMISRTPEVTCVVVDVSQEDPEVQFNWYVDGVEVHNAKTKPREEQFNSKYRVVSVLTVLHQDWLNGKEYKCKVSNKGLPSSIEKTISKAKGQPREPQVYTLPPSREEMTKNQVSLSCAVKGFYPSDIAVEWESNGQPENNYKTTPPVLDSDGSFFLVSKLTVDKSRWQQGNVFSCSVMHEALHNHYTQKSLSLSPGKGGGGSGGGGSGGGGSGGGGSGGGGSGGGGSGGGGSGGGGSCPSCPAPEFLGGPSVFLFPPKPKDTLMISRTPEVTCVVVDVSQEDPEVQFNWYVDGVEVHNAKTKPREEQFNSKYRVVSVLTVLHQDWLNGKEYKCKVSNKGLPSSIEKTISKAKGQPREPQVYTLPPSREEMTKNQVSLWCLVKGFYPSDIAVEWESNGQPENNYKTTPPVLDSDGSFFLYSKLTVDKSRWQQGNVFSCSVMHEALHNHYTQKSLSLSPGK

SEQ ID NO: 328 - DNA, 1539 bp, Artificial Sequence
  source: /note="Description of Artificial Sequence: Synthetic polynucleotide"
atgggcttcggactgtcgtggctttttctggtggcgattcttaagggggtccagtgcgataaaacgcacacgtgcccctcgtgtccggcaccggagtttcttggaggtccctcggtgttcctgttccctcccaagccgaaggacacgttgatgatttcgaggacgccggaggtgacgtgtgtggtcgtagacgtgagccaggaggacccggaagtgcagtttaactggtacgtcgatggagtagaagtacataatgccaagacgaagcccagggaggaacaattcaattcgaagtatcgcgtcgtatccgtgctgactgtgctccaccaggactggcttaacggaaaagaatacaagtgcaaggtatcaaataagggactcccctcgtcgatcgagaaaacaatcagcaaagcgaaaggacagccgagggaaccgcaagtgtacacattgccgccgtcgcgagaagaaatgaccaagaaccaggtatcactctcgtgcgccgtgaagggcttttacccatcggacattgctgtggagtgggagagcaacggtcaacccgagaataactacaaaactacaccgcccgtgctggattccgacggctcattctttctcgtgtcaaaactgactgtggataagtcgcgctggcaacaggggaatgtgttctcgtgcagcgtcatgcatgaagctcttcataatcactacacccaaaaatccctgtcactctcgaaaagctgtgataagaccgggggtgggggctccggaggaggcggttcgggtggcggtgggtcgggtggaggcggatcgggcggtgggggaagcggtggtggtggaagcggagggggtggatcaggtggagggggcagctgtccatcctgccctgcaccagagtttttgggaggaccgtccgtatttctgtttccgcccaagcccaaagatactttgatgatcagcaggacgcctgaggtaacatgtgtagtggtcgatgtctcgcaagaggaccctgaggtccagttcaattggtacgtggacggggtggaagtccacaacgcgaaaacgaaaccacgcgaagaacagttcaacagcaaatacagagtcgtgtcagtcttgacagtccttcaccaggattggttgaatggaaaggagtacaagtgtaaggtgtcaaacaaaggactgcccagctcgatcgaaaagacaatttcgaaggcaaaaggtcaaccgcgggagccacaagtgtatacgctgccgccctcgcgggaggagatgacaaagaatcaggtgtcgctgtggtgtctggtaaaaggattctatccatccgatatcgcggtagagtgggaatcaaacggccagccggagaacaattacaagaccacgccccctgtattggattcggacggatcgttcttcttgtattcgaaactcacggtggacaagtcgcggtggcagcagggtaatgtgttttcatgctcagtcatgcacgaggcgctccataaccattatactcagaagtcgctgtccttgtccggggagtgctgataa

SEQ ID NO: 329 - protein, 511 aa, Artificial Sequence
  source: /note="Description of Artificial Sequence: Synthetic polypeptide"
MGFGLSWLFLVAILKGVQCDKTHTCPSCPAPEFLGGPSVFLFPPKPKDTLMISRTPEVTCVVVDVSQEDPEVQFNWYVDGVEVHNAKTKPREEQFNSKYRVVSVLTVLHQDWLNGKEYKCKVSNKGLPSSIEKTISKAKGQPREPQVYTLPPSREEMTKNQVSLSCAVKGFYPSDIAVEWESNGQPENNYKTTPPVLDSDGSFFLVSKLTVDKSRWQQGNVFSCSVMHEALHNHYTQKSLSLSKSCDKTGGGGSGGGGSGGGGSGGGGSGGGGSGGGGSGGGGSGGGGSCPSCPAPEFLGGPSVFLFPPKPKDTLMISRTPEVTCVVVDVSQEDPEVQFNWYVDGVEVHNAKTKPREEQFNSKYRVVSVLTVLHQDWLNGKEYKCKVSNKGLPSSIEKTISKAKGQPREPQVYTLPPSREEMTKNQVSLWCLVKGFYPSDIAVEWESNGQPENNYKTTPPVLDSDGSFFLYSKLTVDKSRWQQGNVFSCSVMHEALHNHYTQKSLSLSGEC

SEQ ID NO: 330 - DNA, 1524 bp, Artificial Sequence
  source: /note="Description of Artificial Sequence: Synthetic polynucleotide"
atgggcttcggactgtcgtggctttttctggtggcgattcttaagggggtccagtgcgacaaaacgcacacctgtccgtcatgtcctgccccggaattccttggagggccttccgtgtttctcttccctccgaagcccaaggacacgctgatgatctcccggaccccggaggtcacgtgtgtggtagtagacgtgtcacaagaagatccggaggtgcagttcaactggtacgtagatggcgtggaggtgcacaacgccaaaacgaagccccgagaggaacagttcaattcgaagtaccgcgtcgtgtcggtattgactgtattgcatcaagactggttgaacgggaaggagtataagtgtaaagtcagcaacaagggacttccctcgtcaattgaaaagacaatttcgaaagccaaaggccagcccagggagccccaagtgtacaccctgccacccagccgggaagagatgacaaagaatcaagtctcgcttagctgcgctgtcaagggcttctatccatcggacattgcagtggaatgggaatcaaacggacagccggagaataactataagacgacaccccctgtcctcgacagcgacgggtcgttcttccttgtgagcaagctcacggtcgacaaaagccgctggcagcagggaaacgtattctcatgttcggtgatgcacgaagcattgcataaccactacacgcagaagagcttgtcgttgtcgaaaagctgcgacaagacgggagggggagggtccgggggtggtgggagcggcggaggaggtagcggcggaggtggctcgggaggaggtgggtcgggtggtgggggaagcggaggcggagggtcatgtccgagctgcccggcacccgaatttctcggaggtccctcggtgttcctgttcccgccaaagcctaaggatacgttgatgatttcgcgcacgccggaggtaacatgcgtggtggtggatgtgtcacaagaggaccccgaggtccagttcaattggtacgtcgatggagtggaagtgcacaatgcgaaaacaaaaccccgggaggagcagttcaatagcaagtacagggtagtctccgtcctgactgtacttcaccaagactggcttaacggaaaagagtataagtgcaaggtcagcaacaaggggcttccttcatccatcgagaaaaccatctcgaaggccaagggacagccgagggagcctcaagtatacacgctgccgccatcgagagaagaaatgaccaaaaaccaggtgtccctttggtgtttggtgaagggtttctatccctccgatatcgccgtagagtgggagtcaaatggacagcctgagaacaactataagactacgccccctgtgttggacagcgatgggtcattctttctgtattcgaaactcacggtggataagtcgcgatggcaacagggcaatgtgttttcgtgcagcgtgatgcatgaggcgctgcacaaccactatactcagaaatcgttaagcttatcgggagagtgttgataa

SEQ ID NO: 331 - protein, 506 aa, Artificial Sequence
  source: /note="Description of Artificial Sequence: Synthetic polypeptide"
MGFGLSWLFLVAILKGVQCDKTHTCPSCPAPEFLGGPSVFLFPPKPKDTLMISRTPEVTCVVVDVSQEDPEVQFNWYVDGVEVHNAKTKPREEQFNSKYRVVSVLTVLHQDWLNGKEYKCKVSNKGLPSSIEKTISKAKGQPREPQVYTLPPSREEMTKNQVSLSCAVKGFYPSDIAVEWESNGQPENNYKTTPPVLDSDGSFFLVSKLTVDKSRWQQGNVFSCSVMHEALHNHYTQKSLSLSKSCDKTGGGGSGGGGSGGGGSGGGGSGGGGSGGGGSGGGGSCPSCPAPEFLGGPSVFLFPPKPKDTLMISRTPEVTCVVVDVSQEDPEVQFNWYVDGVEVHNAKTKPREEQFNSKYRVVSVLTVLHQDWLNGKEYKCKVSNKGLPSSIEKTISKAKGQPREPQVYTLPPSREEMTKNQVSLWCLVKGFYPSDIAVEWESNGQPENNYKTTPPVLDSDGSFFLYSKLTVDKSRWQQGNVFSCSVMHEALHNHYTQKSLSLSGEC

SEQ ID NO: 332 - DNA, 1524 bp, Artificial Sequence
  source: /note="Description of Artificial Sequence: Synthetic polynucleotide"
atgggcttcggactgtcgtggctttttctggtggcgattcttaagggggtccagtgcgacaaaacgcacacctgtccgtcatgtcctgccccggaattccttggagggccttccgtgtttctcttccctccgaagcccaaggacacgctgatgatctcccggaccccggaggtcacgtgtgtggtagtagacgtgtcacaagaagatccggaggtgcagttcaactggtacgtagatggcgtggaggtgcacaacgccaaaacgaagccccgagaggaacagttcaattcgaagtaccgcgtcgtgtcggtattgactgtattgcatcaagactggttgaacgggaaggagtataagtgtaaagtcagcaacaagggacttccctcgtcaattgaaaagacaatttcgaaagccaaaggccagcccagggagccccaagtgtacaccctgccacccagccgggaagagatgacaaagaatcaagtctcgcttagctgcgctgtcaagggcttctatccatcggacattgcagtggaatgggaatcaaacggacagccggagaataactataagacgacaccccctgtcctcgacagcgacgggtcgttcttccttgtgagcaagctcacggtcgacaaaagccgctggcagcagggaaacgtattctcatgttcggtgatgcacgaagcattgcataaccactacacgcagaagagcttgtcgttgtcgggggaatgcggagggggagggtccggagggggagggtccgggggtggtgggagcggcggaggaggtagcggcggaggtggctcgggaggaggtgggtcgggtggtgggggatcatgtccgagctgcccggcacccgaatttctcggaggtccctcggtgttcctgttcccgccaaagcctaaggatacgttgatgatttcgcgcacgccggaggtaacatgcgtggtggtggatgtgtcacaagaggaccccgaggtccagttcaattggtacgtcgatggagtggaagtgcacaatgcgaaaacaaaaccccgggaggagcagttcaatagcaagtacagggtagtctccgtcctgactgtacttcaccaagactggcttaacggaaaagagtataagtgcaaggtcagcaacaaggggcttccttcatccatcgagaaaaccatctcgaaggccaagggacagccgagggagcctcaagtatacacgctgccgccatcgagagaagaaatgaccaaaaaccaggtgtccctttggtgtttggtgaagggtttctatccctccgatatcgccgtagagtgggagtcaaatggacagcctgagaacaactataagactacgccccctgtgttggacagcgatgggtcattctttctgtattcgaaactcacggtggataagtcgcgatggcaacagggcaatgtgttttcgtgcagcgtgatgcatgaggcgctgcacaaccactatactcagaaatcgttaagcttatcgaagtcatgcgacaagacttgataa

SEQ ID NO: 333 - protein, 506 aa, Artificial Sequence
  source: /note="Description of Artificial Sequence: Synthetic polypeptide"
MGFGLSWLFLVAILKGVQCDKTHTCPSCPAPEFLGGPSVFLFPPKPKDTLMISRTPEVTCVVVDVSQEDPEVQFNWYVDGVEVHNAKTKPREEQFNSKYRVVSVLTVLHQDWLNGKEYKCKVSNKGLPSSIEKTISKAKGQPREPQVYTLPPSREEMTKNQVSLSCAVKGFYPSDIAVEWESNGQPENNYKTTPPVLDSDGSFFLVSKLTVDKSRWQQGNVFSCSVMHEALHNHYTQKSLSLSGECGGGGSGGGGSGGGGSGGGGSGGGGSGGGGSGGGGSCPSCPAPEFLGGPSVFLFPPKPKDTLMISRTPEVTCVVVDVSQEDPEVQFNWYVDGVEVHNAKTKPREEQFNSKYRVVSVLTVLHQDWLNGKEYKCKVSNKGLPSSIEKTISKAKGQPREPQVYTLPPSREEMTKNQVSLWCLVKGFYPSDIAVEWESNGQPENNYKTTPPVLDSDGSFFLYSKLTVDKSRWQQGNVFSCSVMHEALHNHYTQKSLSLSKSCDKT

SEQ ID NO: 334 - DNA, 1509 bp, Artificial Sequence
  source: /note="Description of Artificial Sequence: Synthetic polynucleotide"
atgggcttcggactgtcgtggctttttctggtggcgattcttaagggggtccagtgcgacaaaacgcacacctgtccgtcatgtcctgccccggaattccttggagggccttccgtgtttctcttccctccgaagcccaaggacacgctgatgatctcccggaccccggaggtcacgtgtgtggtagtagacgtgtcacaagaagatccggaggtgcagttcaactggtacgtagatggcgtggaggtgcacaacgccaaaacgaagccccgagaggaacagttcaattcgaagtaccgcgtcgtgtcggtattgactgtattgcatcaagactggttgaacgggaaggagtataagtgtaaagtcagcaacaagggacttccctcgtcaattgaaaagacaatttcgaaagccaaaggccagcccagggagccccaagtgtacaccctgccacccagccgggaagagatgacaaagaatcaagtctcgcttagctgcgctgtcaagggcttctatccatcggacattgcagtggaatgggaatcaaacggacagccggagaataactataagacgacaccccctgtcctcgacagcgacgggtcgttcttccttgtgagcaagctcacggtcgacaaaagccgctggcagcagggaaacgtattctcatgttcggtgatgcacgaagcattgcataaccactacacgcagaagagcttgtcgttgtcgaaaagctgcgacaagacgggagggggagggtccgggggtggtgggagcggcggaggaggtagcggcggaggtggctcgggaggaggtgggtcgggtggtgggggatcatgtccgagctgcccggcacccgaatttctcggaggtccctcggtgttcctgttcccgccaaagcctaaggatacgttgatgatttcgcgcacgccggaggtaacatgcgtggtggtggatgtgtcacaagaggaccccgaggtccagttcaattggtacgtcgatggagtggaagtgcacaatgcgaaaacaaaaccccgggaggagcagttcaatagcaagtacagggtagtctccgtcctgactgtacttcaccaagactggcttaacggaaaagagtataagtgcaaggtcagcaacaaggggcttccttcatccatcgagaaaaccatctcgaaggccaagggacagccgagggagcctcaagtatacacgctgccgccatcgagagaagaaatgaccaaaaaccaggtgtccctttggtgtttggtgaagggtttctatccctccgatatcgccgtagagtgggagtcaaatggacagcctgagaacaactataagactacgccccctgtgttggacagcgatgggtcattctttctgtattcgaaactcacggtggataagtcgcgatggcaacagggcaatgtgttttcgtgcagcgtgatgcatgaggcgctgcacaaccactatactcagaaatcgttaagcttatcgggagagtgttgataa

SEQ ID NO: 335 - protein, 501 aa, Artificial Sequence
  source: /note="Description of Artificial Sequence: Synthetic polypeptide"
MGFGLSWLFLVAILKGVQCDKTHTCPSCPAPEFLGGPSVFLFPPKPKDTLMISRTPEVTCVVVDVSQEDPEVQFNWYVDGVEVHNAKTKPREEQFNSKYRVVSVLTVLHQDWLNGKEYKCKVSNKGLPSSIEKTISKAKGQPREPQVYTLPPSREEMTKNQVSLSCAVKGFYPSDIAVEWESNGQPENNYKTTPPVLDSDGSFFLVSKLTVDKSRWQQGNVFSCSVMHEALHNHYTQKSLSLSKSCDKTGGGGSGGGGSGGGGSGGGGSGGGGSGGGGSCPSCPAPEFLGGPSVFLFPPKPKDTLMISRTPEVTCVVVDVSQEDPEVQFNWYVDGVEVHNAKTKPREEQFNSKYRVVSVLTVLHQDWLNGKEYKCKVSNKGLPSSIEKTISKAKGQPREPQVYTLPPSREEMTKNQVSLWCLVKGFYPSDIAVEWESNGQPENNYKTTPPVLDSDGSFFLYSKLTVDKSRWQQGNVFSCSVMHEALHNHYTQKSLSLSGEC

SEQ ID NO: 336 - DNA, 1494 bp, Artificial Sequence
  source: /note="Description of Artificial Sequence: Synthetic polynucleotide"
atgggcttcggactgtcgtggctttttctggtggcgattcttaagggggtccagtgcgacaaaacgcacacctgtccgtcatgtcctgccccggaattccttggagggccttccgtgtttctcttccctccgaagcccaaggacacgctgatgatctcccggaccccggaggtcacgtgtgtggtagtagacgtgtcacaagaagatccggaggtgcagttcaactggtacgtagatggcgtggaggtgcacaacgccaaaacgaagccccgagaggaacagttcaattcgaagtaccgcgtcgtgtcggtattgactgtattgcatcaagactggttgaacgggaaggagtataagtgtaaagtcagcaacaagggacttccctcgtcaattgaaaagacaatttcgaaagccaaaggccagcccagggagccccaagtgtacaccctgccacccagccgggaagagatgacaaagaatcaagtctcgcttagctgcgctgtcaagggcttctatccatcggacattgcagtggaatgggaatcaaacggacagccggagaataactataagacgacaccccctgtcctcgacagcgacgggtcgttcttccttgtgagcaagctcacggtcgacaaaagccgctggcagcagggaaacgtattctcatgttcggtgatgcacgaagcattgcataaccactacacgcagaagagcttgtcgttgtcgaaaagctgcgacaagacgggagggggagggtccgggggtggtgggagcggcggaggaggtagcggcggaggtggctcgggaggaggtgggtcatgtccgagctgcccggcacccgaatttctcggaggtccctcggtgttcctgttcccgccaaagcctaaggatacgttgatgatttcgcgcacgccggaggtaacatgcgtggtggtggatgtgtcacaagaggaccccgaggtccagttcaattggtacgtcgatggagtggaagtgcacaatgcgaaaacaaaaccccgggaggagcagttcaatagcaagtacagggtagtctccgtcctgactgtacttcaccaagactggcttaacggaaaagagtataagtgcaaggtcagcaacaaggggcttccttcatccatcgagaaaaccatctcgaaggccaagggacagccgagggagcctcaagtatacacgctgccgccatcgagagaagaaatgaccaaaaaccaggtgtccctttggtgtttggtgaagggtttctatccctccgatatcgccgtagagtgggagtcaaatggacagcctgagaacaactataagactacgccccctgtgttggacagcgatgggtcattctttctgtattcgaaactcacggtggataagtcgcgatggcaacagggcaatgtgttttcgtgcagcgtgatgcatgaggcgctgcacaaccactatactcagaaatcgttaagcttatcgggagagtgttgataa

SEQ ID NO: 337 - protein, 496 aa, Artificial Sequence
  source: /note="Description of Artificial Sequence: Synthetic polypeptide"
MGFGLSWLFLVAILKGVQCDKTHTCPSCPAPEFLGGPSVFLFPPKPKDTLMISRTPEVTCVVVDVSQEDPEVQFNWYVDGVEVHNAKTKPREEQFNSKYRVVSVLTVLHQDWLNGKEYKCKVSNKGLPSSIEKTISKAKGQPREPQVYTLPPSREEMTKNQVSLSCAVKGFYPSDIAVEWESNGQPENNYKTTPPVLDSDGSFFLVSKLTVDKSRWQQGNVFSCSVMHEALHNHYTQKSLSLSKSCDKTGGGGSGGGGSGGGGSGGGGSGGGGSCPSCPAPEFLGGPSVFLFPPKPKDTLMISRTPEVTCVVVDVSQEDPEVQFNWYVDGVEVHNAKTKPREEQFNSKYRVVSVLTVLHQDWLNGKEYKCKVSNKGLPSSIEKTISKAKGQPREPQVYTLPPSREEMTKNQVSLWCLVKGFYPSDIAVEWESNGQPENNYKTTPPVLDSDGSFFLYSKLTVDKSRWQQGNVFSCSVMHEALHNHYTQKSLSLSGEC

SEQ ID NO: 338 - DNA, 1539 bp, Artificial Sequence
  source: /note="Description of Artificial Sequence: Synthetic polynucleotide"
atgggcttcggactgtcgtggctttttctggtggcgattcttaagggggtccagtgcgacaaaacgcacacttgtccttcctgccctgccccggagttccttggcggaccctcggtctttttgtttccgccgaaaccgaaagacacccttatgattagcaggacacccgaagtcacgtgtgtcgtcgtggacgtgtcgcaagaggatcccgaggtgcagttcaactggtacgtggacggggtagaagtccacaatgccaagacaaaaccccgggaagaacagtttaactcgaagtaccgcgtagtgtcagtcttgacagtcctccatcaggactggcttaacgggaaggagtacaaatgtaaagtgtcaaacaagggtctgccttccagcattgagaaaacgatctccaaggctaaagggcagccccgagaaccacaagtctatacgcttccaccatcgcgggaggagatgaccaagaaccaggtccacttgacctgtctcgtgaaggggttctacccgtcagatatcgcggtagagtgggaatcgaacggccagcccgagaataactacaagacgactcctccggtcctcgattcagatgggtcgttcgcactctactcaaaacttacggtggacaagtcgagatggcagcagggcaacgtgtttagctgctcagtcatgcacgaggcgctgcataatcactatacacagaagtcgctgtcattgtcaaaaagctgcgacaagacagggggtggaggttcaggcggtggtgggtcgggagggggagggtcaggtggaggcggcagcgggggtgggggatcgggaggaggagggtccgggggagggggttccggagggggtgggtcctgtccgtcgtgccctgcaccggaattcttgggcggtccgtcagtgttcctgtttcccccgaaacccaaagatacgctcatgatttcccgcacccctgaggtcacttgcgtggtagtcgatgtcagccaggaagatcccgaagtacagttcaattggtacgtagatggtgtagaagtacacaacgctaaaactaagcctcgcgaagagcagttcaattcgaagtatcgggtagtaagcgtgctgactgtgctccatcaagactggctgaatggaaaagagtataagtgcaaagtctcgaataagggattgcccagctccatcgagaaaaccatctcgaaagcgaagggacagcccagagaaccccaagtgaccacattgccaccctcccgagaggaaatgactaagaatcaagtgtcactcacatgtcttgtgaagggattctatcccagcgacatcgccgtcgagtgggagtccaatgggcagccggaaaacaattacaaaacgtttccacccgtccttgactcagatggatcgttctttctctattcgaagctcacggtagataagtcgaggtggcaacaaggaaatgtgttttcatgttcggtgatgcatgaagcgctccataaccactatacgcagaaatcgctttcgctctccggtgaatgctgataa

SEQ ID NO: 339 - protein, 511 aa, Artificial Sequence
  source: /note="Description of Artificial Sequence: Synthetic polypeptide"
MGFGLSWLFLVAILKGVQCDKTHTCPSCPAPEFLGGPSVFLFPPKPKDTLMISRTPEVTCVVVDVSQEDPEVQFNWYVDGVEVHNAKTKPREEQFNSKYRVVSVLTVLHQDWLNGKEYKCKVSNKGLPSSIEKTISKAKGQPREPQVYTLPPSREEMTKNQVHLTCLVKGFYPSDIAVEWESNGQPENNYKTTPPVLDSDGSFALYSKLTVDKSRWQQGNVFSCSVMHEALHNHYTQKSLSLSKSCDKTGGGGSGGGGSGGGGSGGGGSGGGGSGGGGSGGGGSGGGGSCPSCPAPEFLGGPSVFLFPPKPKDTLMISRTPEVTCVVVDVSQEDPEVQFNWYVDGVEVHNAKTKPREEQFNSKYRVVSVLTVLHQDWLNGKEYKCKVSNKGLPSSIEKTISKAKGQPREPQVTTLPPSREEMTKNQVSLTCLVKGFYPSDIAVEWESNGQPENNYKTFPPVLDSDGSFFLYSKLTVDKSRWQQGNVFSCSVMHEALHNHYTQKSLSLSGEC

SEQ ID NO: 340 - DNA, 1539 bp, Artificial Sequence
  source: /note="Description of Artificial Sequence: Synthetic polynucleotide"
atgggcttcggactgtcgtggctttttctggtggcgattcttaagggggtccagtgcgacaaaacgcacacttgtccttcctgccctgccccggagttccttggcggaccctcggtctttttgtttccgccgaaaccgaaagacacccttatgattagcaggacacccgaagtcacgtgtgtcgtcgtggacgtgtcgcaagaggatcccgaggtgcagttcaactggtacgtggacggggtagaagtccacaatgccaagacaaaaccccgggaagaacagtttaactcgaagtaccgcgtagtgtcagtcttgacagtcctccatcaggactggcttaacgggaaggagtacaaatgtaaagtgtcaaacaagggtctgccttccagcattgagaaaacgatctccaaggctaaaggacagccaagagagcctcaagtctatacattgcccccgagccgggaggaaatgaccaaaaaccaggtatcgcttacgtgcttggtggacgggttttacccttcagacatcgcagtggagtgggaatccaacgggcagccagagaacaattacgataccactccacccgtgcttgacagcgatggctcattcttcctctattccgacttgaccgtcgataagtcacgatggcagcaggggaatgtgtttagctgttcggtcatgcacgaagcgctgcacaaccactacacgcagaagtcgctctcattgtccaaaagctgcgacaagacagggggtggaggttcaggcggtggtgggtcgggagggggagggtcaggtggaggcggcagcgggggtgggggatcgggaggaggagggtccgggggagggggttccggagggggtgggtcctgtccgtcgtgccctgcaccggaattcttgggcggtccgtcagtgttcctgtttcccccgaaacccaaagatacgctcatgatttcccgcacccctgaggtcacttgcgtggtagtcgatgtcagccaggaagatcccgaagtacagttcaattggtacgtagatggtgtagaagtacacaacgctaaaactaagcctcgcgaagagcagttcaattcgaagtatcgggtagtaagcgtgctgactgtgctccatcaagactggctgaatggaaaagagtataagtgcaaagtctcgaataagggattgcccagctccatcgagaaaaccatctcgaaagcgaagggacagcccagagaaccccaagtgtatacgcttcccccttcaagaaagaagatgactaagaatcaggtgtcactcacgtgcctcgtgaagggattctatccgtcggacatcgcggtcgaatgggagtcgaatggacagccggagaacaactacaagacaacacctccagtgctgaaatcggatgggagcttctttctgtattcgaagctcacggtagataagtcgaggtggcaacaaggaaatgtgttttcatgttcggtgatgcatgaagcgctccataaccactatacgcagaaatcgctttcgctctccggtgaatgctgataa

SEQ ID NO: 341 - protein, 511 aa, Artificial Sequence
  source: /note="Description of Artificial Sequence: Synthetic polypeptide"
MGFGLSWLFLVAILKGVQCDKTHTCPSCPAPEFLGGPSVFLFPPKPKDTLMISRTPEVTCVVVDVSQEDPEVQFNWYVDGVEVHNAKTKPREEQFNSKYRVVSVLTVLHQDWLNGKEYKCKVSNKGLPSSIEKTISKAKGQPREPQVYTLPPSREEMTKNQVSLTCLVDGFYPSDIAVEWESNGQPENNYDTTPPVLDSDGSFFLYSDLTVDKSRWQQGNVFSCSVMHEALHNHYTQKSLSLSKSCDKTGGGGSGGGGSGGGGSGGGGSGGGGSGGGGSGGGGSGGGGSCPSCPAPEFLGGPSVFLFPPKPKDTLMISRTPEVTCVVVDVSQEDPEVQFNWYVDGVEVHNAKTKPREEQFNSKYRVVSVLTVLHQDWLNGKEYKCKVSNKGLPSSIEKTISKAKGQPREPQVYTLPPSRKKMTKNQVSLTCLVKGFYPSDIAVEWESNGQPENNYKTTPPVLKSDGSFFLYSKLTVDKSRWQQGNVFSCSVMHEALHNHYTQKSLSLSGEC

SEQ ID NO: 342 - DNA, 2907 bp, Artificial Sequence
  source: /note="Description of Artificial Sequence: Synthetic polynucleotide"
gaggtgcaactggtagaaagcggaggtggtcttgtacagcccggtggttcactcagactgtcgtgcgcagcttcagggtatacgttcacctcctactggctccattgggtgcgacaggctccggggaaaggactggaatgggtcgggatgattgatccgtcgaattcggatactaggttcaatcccaacttcaaggaccggtttaccattagcgcggatacctcgaaaaacaccgcatatctccaaatgaactcgttgagagccgaggacacggcggtgtattactgcgcaagatacgggtcgtatgtgtcaccgttggactactggggccaggggacactggtaacggtcagctcagctagcacgaagggacctagcgtgttcccattggcgcccagctcgaaatccacatcgggcggaacggcagcccttgggtgcctcgtgaaagactactttcccgaaccggtgactgtgtcgtggaattcaggggcattgacttccggtgtccacacatttccagccgtgctgcagtccagcgggttgtattcgctctcgtcagtggtcacagtcccatcctcctcgctcggaacacaaacctatatctgtaatgtcaaccataaaccttcaaatacaaaagtggacaaaaaggtagaaccgaaatcatgcgacaaaacgcacacctgtccgccctgtcctgccccggaacttctcggagggccttccgtgtttctcttccctccgaagcccaaggacacgctgatgatctcccggaccccggaggtcacgtgtgtggtagtagacgtgtcacacgaagatccggaggtgaagttcaactggtacgtagatggcgtggaggtgcacaacgccaaaacgaagccccgagaggaacagtaccagtcaacgtaccgcgtcgtgtcggtattgactgtattgcatcaagactggttgaacgggaaggagtataagtgtaaagtcagcaacaaggctcttcccgcacccattgaaaagacaatttcgaaagccaaaggccagcccagggagccccaagtgtacaccctgccacccagccgggaagagatgacaaagaatcaagtctcgcttagctgcgctgtcaagggcttctatccatcggacattgcagtggaatgggaatcaaacggacagccggagaataactataagacgacaccccctgtcctcgacagcgacgggtcgttcttccttgtgagcaagctcacggtcgacaaaagccgctggcagcagggaaacgtattctcatgttcggtgatgcacgaagcattgcataaccactacacgcagaagagcttgtcgttgagcggggaatgcggagggggagggtccgggggtggtgggagcggcggaggaggtagcggcggaggtggctcgggaggaggtgggtcgggtggtgggggaagcggaggcggagggtcatgtccgccgtgcccggcacccgaactgctcggaggtccctcggtgttcctgttcccgccaaagcctaaggatacgttgatgatttcgcgcacgccggaggtaacatgcgtggtggtggatgtgtcacatgaggaccccgaggtcaagttcaattggtacgtcgatggagtggaagtgcacaatgcgaaaacaaaaccccgggaggagcagtatcagagcacgtacagggtagtctccgtcctgactgtacttcaccaagactggcttaacggaaaagagtataagtgcaaggtcagcaacaaggcgcttcctgcccctatcgagaaaaccatctcgaaggccaagggacagccgagggagcctcaagtatacacgctgccgccatcgagagaagaaatgaccaaaaaccaggtgtccctttggtgtttggtgaagggtttctatccctccgatatcgccgtagagtgggagtcaaatggacagcctgagaacaactataagactacgccccctgtgttggacagcgatgggtcattctttctgtattcgaaactcacggtggataagtcgcgatggcaacagggcaatgtgttttcgtgcagcgtgatgcatgaggcgctgcacaaccactatactcagaaatcgttaagcttatcgaagtcatgcgacaagactggaggtggagggagcggtggtgggggatcccaagtccagttgcaagaaagcgggccaggactcgtgaaaccctcggaaaccctgtcactgacgtgcacggtgagcggagggtccgtgtcgagcggagattactattggacttggattagacagtcgcccggaaaaggtctggagtggatcggacacatctactactcggggaatacgaattacaacccgtcgttgaaatcacggctcacgattagcatcgatacctccaagacgcagttctcgctcaaacttagctccgtaactgcggccgacaccgcaatctactattgtgtacgcgaccgcgtcacaggggcttttgacatttggggtcagggcactatggtgacctcgtcagcgtcgacaggtggtgggggatcaggaggaggtggctccgggggaggcggaagcggcggtgggggctccgacatccagatgacgcagtcgccctcatcattgtcagcatcagtcggggacagggtcactattacttgtcaggccagccaagatatctcgaactatctgaactggtatcagcagaagcctggaaaagcgcctaagctccttatctatgatgcgtccaatcttgagacaggggtgccgtcgcggttttccggttcagggtcgggaacggacttcacgtttacaatctccagcctgcagccggaggacgaagccacctacttctgccaacacttcgaccatttgcctcttgcgttcggaggtgggacaaaggtggagatcaagcgaact

SEQ ID NO: 343 - protein, 969 aa, Artificial Sequence
  source: /note="Description of Artificial Sequence: Synthetic polypeptide"
EVQLVESGGGLVQPGGSLRLSCAASGYTFTSYWLHWVRQAPGKGLEWVGMIDPSNSDTRFNPNFKDRFTISADTSKNTAYLQMNSLRAEDTAVYYCARYGSYVSPLDYWGQGTLVTVSSASTKGPSVFPLAPSSKSTSGGTAALGCLVKDYFPEPVTVSWNSGALTSGVHTFPAVLQSSGLYSLSSVVTVPSSSLGTQTYICNVNHKPSNTKVDKKVEPKSCDKTHTCPPCPAPELLGGPSVFLFPPKPKDTLMISRTPEVTCVVVDVSHEDPEVKFNWYVDGVEVHNAKTKPREEQYQSTYRVVSVLTVLHQDWLNGKEYKCKVSNKALPAPIEKTISKAKGQPREPQVYTLPPSREEMTKNQVSLSCAVKGFYPSDIAVEWESNGQPENNYKTTPPVLDSDGSFFLVSKLTVDKSRWQQGNVFSCSVMHEALHNHYTQKSLSLSGECGGGGSGGGGSGGGGSGGGGSGGGGSGGGGSGGGGSCPPCPAPELLGGPSVFLFPPKPKDTLMISRTPEVTCVVVDVSHEDPEVKFNWYVDGVEVHNAKTKPREEQYQSTYRVVSVLTVLHQDWLNGKEYKCKVSNKALPAPIEKTISKAKGQPREPQVYTLPPSREEMTKNQVSLWCLVKGFYPSDIAVEWESNGQPENNYKTTPPVLDSDGSFFLYSKLTVDKSRWQQGNVFSCSVMHEALHNHYTQKSLSLSKSCDKTGGGGSGGGGSQVQLQESGPGLVKPSETLSLTCTVSGGSVSSGDYYWTWIRQSPGKGLEWIGHIYYSGNTNYNPSLKSRLTISIDTSKTQFSLKLSSVTAADTAIYYCVRDRVTGAFDIWGQGTMVTSSASTGGGGSGGGGSGGGGSGGGGSDIQMTQSPSSLSASVGDRVTITCQASQDISNYLNWYQQKPGKAPKLLIYDASNLETGVPSRFSGSGSGTDFTFTISSLQPEDEATYFCQHFDHLPLAFGGGTKVEIKRT

SEQ ID NO: 344 - DNA, 714 bp, Artificial Sequence
  source: /note="Description of Artificial Sequence: Synthetic polynucleotide"
atggggacccctgcgcagttgcttttcctcctccttctctggttgcccgacacgacaggagacatcgtgctgacccagtcaccggattcgcttgcagtctcactgggagagagagccacgatcaattgcaagtcctcggaatcagtggacagctacgctaactcattcatgcactggtatcagcagaagcctggccagccgcccaagttgctgatctaccgcgcaagcacacgggagtcgggggtgccagataggttttccggatcgggttcccgaacggacttcacactcacgatttcatccttgcaagccgaagatgtggcggtctattactgtcaacagtcgaaagaggatccccttacttttggtgggggtactaaagtagagattaagcgtacggtggcagcgccgtcagtctttatcttccctccttcggatgagcagcttaagagcgggacagcctcagtagtctgccttctcaacaacttttacccgagagaggccaaggtgcagtggaaggtggataatgccttgcagtcagggaactcacaagaatcggtcacagaacaggactccaaagatagcacttattccctgtcaagcacgctcactttgtccaaagcggactacgagaagcacaaagtgtacgcttgcgaggtgactcatcaaggattgtcgagccccgtaacgaagagcttcaatcggggcgagtgt

SEQ ID NO: 345 - protein, 238 aa, Artificial Sequence
  source: /note="Description of Artificial Sequence: Synthetic polypeptide"
MGTPAQLLFLLLLWLPDTTGDIVLTQSPDSLAVSLGERATINCKSSESVDSYANSFMHWYQQKPGQPPKLLIYRASTRESGVPDRFSGSGSRTDFTLTISSLQAEDVAVYYCQQSKEDPLTFGGGTKVEIKRTVAAPSVFIFPPSDEQLKSGTASVVCLLNNFYPREAKVQWKVDNALQSGNSQESVTEQDSKDSTYSLSSTLTLSKADYEKHKVYACEVTHQGLSSPVTKSFNRGEC

SEQ ID NO: 346 - DNA, 2913 bp, Artificial Sequence
  source: /note="Description of Artificial Sequence: Synthetic polynucleotide"
gaggtgcaactggtagaaagcggaggtggtcttgtacagcccggtggttcactcagactgtcgtgcgcagcttcagggtatacgttcacctcctactggctccattgggtgcgacaggctccggggaaaggactggaatgggtcgggatgattgatccgtcgaattcggatactaggttcaatcccaacttcaaggaccggtttaccattagcgcggatacctcgaaaaacaccgcatatctccaaatgaactcgttgagagccgaggacacggcggtgtattactgcgcaagatacgggtcgtatgtgtcaccgttggactactggggccaggggacactggtaacggtcagctcagctagcacgaagggacctagcgtgttcccattggcgcccagctcgaaatccacatcgggcggaacggcagcccttgggtgcctcgtgaaagactactttcccgaaccggtgactgtgtcgtggaattcaggggcattgacttccggtgtccacacatttccagccgtgctgcagtccagcgggttgtattcgctctcgtcagtggtcacagtcccatcctcctcgctcggaacacaaacctatatctgtaatgtcaaccataaaccttcaaatacaaaagtggacaaaaaggtagaaccgaaatcatgcgataagacccacacatgccctccctgtccagcacccgagctgctcgggggaccctcggtgttcttgtttcctcccaaacccaaagatacccttatgattagccggacaccagaggtgacgtgcgtggtagtagacgtgtcccatgaggacccggaggtcaagttcaactggtacgtggacggagtggaggtgcacaatgcaaagaccaagccgagggaagagcaataccagtccacatatagagtcgtgtcggtccttacggtcttgcatcaggactggctgaatggcaaagaatacaaatgtaaagtctccaacaaagctctcccagcgcccattgagaaaacaatctcaaaagcgaaaggccaaccgagagaacctcaagtctatactcttcccccgtcgagagaggaaatgaccaaaaaccaggtatccctgtcatgcgcggtcaaggggttttacccaagcgacatcgccgtggagtgggagtcgaacggacagccagagaataactataagacgacccctcccgtgctggattcggatggatcgttctttcttgtcagcaaactcacagtcgacaaatcaaggtggcagcaagggaacgtgttcagctgttcggtaatgcatgaagccctccacaatcactacacgcagaaatccctgtcgctctcaccagggaagactagacccgctccaccctcaaccgcgacaacagccggctcgacgcctcagcccgaatcggcctcaccgtcgggcaaagagcctgcggcatcgtcgccctcgtcaaccaatacaggctcatgtccgccgtgccctgcccccgaattgctgggaggtccgtccgtatttctgtttcccccgaagcctaaagatactcttatgatctcgcgaacgccggaagtaacttgtgtcgtggtagatgtctcacacgaagatcccgaagtgaaattcaattggtatgtcgacggcgtggaggtacataacgccaagacgaagcctagagaggaacagtaccagtcaacgtatcgggtcgtatccgtgctcaccgtgctccaccaggattggctgaacggaaaggagtacaagtgcaaagtctcgaacaaggcgttgcctgcgccaatcgaaaagacgatctccaaagctaagggacaaccaagggaaccacaagtgtatactctcccgccctcgcgcgaagagatgacaaagaatcaggtgtcactttggtgcttggtgaaggggttctatccctcggatattgcggtcgagtgggagagcaatggtcaaccggagaacaattacaagacgacaccgcccgtattggactccgacgggtccttctttctctactcgaagctcactgtagataagtcgcgatggcagcaggggaacgtctttagctgttccgtgatgcacgaggcacttcataaccactatacccagaagtcgttgtcgctttcccccggaaaaggaggtggagggagcggtggtgggggatcccaagtccagttgcaagaaagcgggccaggactcgtgaaaccctcggaaaccctgtcactgacgtgcacggtgagcggagggtccgtgtcgagcggagattactattggacttggattagacagtcgcccggaaaaggtctggagtggatcggacacatctactactcggggaatacgaattacaacccgtcgttgaaatcacggctcacgattagcatcgatacctccaagacgcagttctcgctcaaacttagctccgtaactgcggccgacaccgcaatctactattgtgtacgcgaccgcgtcacaggggcttttgacatttggggtcagggcactatggtgacctcgtcagcgtcgacaggtggtgggggatcaggaggaggtggctccgggggaggcggaagcggcggtgggggctccgacatccagatgacgcagtcgccctcatcattgtcagcatcagtcggggacagggtcactattacttgtcaggccagccaagatatctcgaactatctgaactggtatcagcagaagcctggaaaagcgcctaagctccttatctatgatgcgtccaatcttgagacaggggtgccgtcgcggttttccggttcagggtcgggaacggacttcacgtttacaatctccagcctgcagccggaggacgaagccacctacttctgccaacacttcgaccatttgcctcttgcgttcggaggtgggacaaaggtggagatcaagcgaact

SEQ ID NO: 347 - protein, 971 aa, Artificial Sequence
  source: /note="Description of Artificial Sequence: Synthetic polypeptide"
EVQLVESGGGLVQPGGSLRLSCAASGYTFTSYWLHWVRQAPGKGLEWVGMIDPSNSDTRFNPNFKDRFTISADTSKNTAYLQMNSLRAEDTAVYYCARYGSYVSPLDYWGQGTLVTVSSASTKGPSVFPLAPSSKSTSGGTAALGCLVKDYFPEPVTVSWNSGALTSGVHTFPAVLQSSGLYSLSSVVTVPSSSLGTQTYICNVNHKPSNTKVDKKVEPKSCDKTHTCPPCPAPELLGGPSVFLFPPKPKDTLMISRTPEVTCVVVDVSHEDPEVKFNWYVDGVEVHNAKTKPREEQYQSTYRVVSVLTVLHQDWLNGKEYKCKVSNKALPAPIEKTISKAKGQPREPQVYTLPPSREEMTKNQVSLSCAVKGFYPSDIAVEWESNGQPENNYKTTPPVLDSDGSFFLVSKLTVDKSRWQQGNVFSCSVMHEALHNHYTQKSLSLSPGKTRPAPPSTATTAGSTPQPESASPSGKEPAASSPSSTNTGSCPPCPAPELLGGPSVFLFPPKPKDTLMISRTPEVTCVVVDVSHEDPEVKFNWYVDGVEVHNAKTKPREEQYQSTYRVVSVLTVLHQDWLNGKEYKCKVSNKALPAPIEKTISKAKGQPREPQVYTLPPSREEMTKNQVSLWCLVKGFYPSDIAVEWESNGQPENNYKTTPPVLDSDGSFFLYSKLTVDKSRWQQGNVFSCSVMHEALHNHYTQKSLSLSPGKGGGGSGGGGSQVQLQESGPGLVKPSETLSLTCTVSGGSVSSGDYYWTWIRQSPGKGLEWIGHIYYSGNTNYNPSLKSRLTISIDTSKTQFSLKLSSVTAADTAIYYCVRDRVTGAFDIWGQGTMVTSSASTGGGGSGGGGSGGGGSGGGGSDIQMTQSPSSLSASVGDRVTITCQASQDISNYLNWYQQKPGKAPKLLIYDASNLETGVPSRFSGSGSGTDFTFTISSLQPEDEATYFCQHFDHLPLAFGGGTKVEIKRT

SEQ ID NO: 348 - DNA, 2912 bp, Artificial Sequence
  source: /note="Description of Artificial Sequence: Synthetic polynucleotide"
gaggtgcaactggagaaagcggaggtggtcttgtacagcccggtggttcactcagactgtcgtgcgcagcttcagggtatacgttcacctcctactggctccattgggtgcgacaggctccggggaaaggactggaatgggtcgggatgattgatccgtcgaattcggatactaggttcaatcccaacttcaaggaccggtttaccattagcgcggatacctcgaaaaacaccgcatatctccaaatgaactcgttgagagccgaggacacggcggtgtattactgcgcaagatacgggtcgtatgtgtcaccgttggactactggggccaggggacactggtaacggtcagctcagctagcacgaagggacctagcgtgttcccattggcgcccagctcgaaatccacatcgggcggaacggcagcccttgggtgcctcgtgaaagactactttcccgaaccggtgactgtgtcgtggaattcaggggcattgacttccggtgtccacacatttccagccgtgctgcagtccagcgggttgtattcgctctcgtcagtggtcacagtcccatcctcctcgctcggaacacaaacctatatctgtaatgtcaaccataaaccttcaaatacaaaagtggacaaaaaggtagaaccgaaatcatgcgacaagacccatacatgcccaagctgtcccgctccggagtttctcggtggaccgtcggtgtttctgttccctccgaagccaaaagataccttgatgatttcgcgaactcccgaagtcacgtgtgtcgtcgtggacgtaagccaggaggacccggaggtccagttcaattggtatgtagacggcgtagaggtacataatgcgaaaacgaagcccagagaggaacagttcaatagcaaataccgcgtagtatcggtgctgacagtgttgcaccaggactggctgaatggaaaagaatacaagtgtaaagtgtccaacaagggccttccatcgtcgattgaaaagacaatctccaaggcaaaggggcagcctagggagccccaagtctacaccctgcccccttcgcgggaggagatgacgaagaaccaggtatcactgtcatgcgcggtcaaaggattttacccgagcgacatcgccgtagaatgggagtccaacggacagccagaaaacaattacaagaccactcctccagtgctcgatagcgatggctccttctttcttgtcagcaaattgacagtcgataagtcaagatggcagcagggtaatgtgttctcatgtagcgtcatgcacgaagcactccacaatcattatacacagaagagcctctcgttgtcgcccggaaaaactagacccgctccaccctcaaccgcgacaacagccggctcgacgcctcagcccgaatcggcctcaccgtcgggcaaagagcctgcggcatcgtcgccctcgtcaaccaatacaggctcatgcccttcatgtccagcccccgagttcctcggaggcccgtcggtctttctttttccccctaagcctaaagataccctgatgatcagccggacgcctgaggtgacttgtgtggtagtcgacgtgtcccaagaagatccggaagtccagtttaactggtatgtggatggagtggaggtccataatgccaagacaaagccaagggaggagcaattcaactcgaagtaccgcgtcgtgtccgtgctcacagtgcttcatcaagactggttgaacggaaaggagtacaaatgtaaggtatcaaacaagggtttgccctcgtccatcgagaaaaccatctcgaaagcgaaagggcaaccccgcgagccccaggtatatacgctcccgccttcaagagaagaaatgacgaaaaaccaagtgagcttgtggtgcctggtcaaggggttctatccctccgatatcgcggtagagtgggaaagcaatgggcagccggagaacaactataagacaacgcctcccgtgttggactcagatggatcgttcttcttgtactcaaagcttacggtggacaagtcacgctggcagcaagggaacgtgttttcgtgctcggtgatgcacgaggcgcttcacaatcactacactcagaaatcgcttagcttgtcaccaggaaaaggaggtggagggagcggtggtgggggatcccaagtccagttgcaagaaagcgggccaggactcgtgaaaccctcggaaaccctgtcactgacgtgcacggtgagcggagggtccgtgtcgagcggagattactattggacttggattagacagtcgcccggaaaaggtctggagtggatcggacacatctactactcggggaatacgaattacaacccgtcgttgaaatcacggctcacgattagcatcgatacctccaagacgcagttctcgctcaaacttagctccgtaactgcggccgacaccgcaatctactattgtgtacgcgaccgcgtcacaggggcttttgacatttggggtcagggcactatggtgacctcgtcagcgtcgacaggtggtgggggatcaggaggaggtggctccgggggaggcggaagcggcggtgggggctccgacatccagatgacgcagtcgccctcatcattgtcagcatcagtcggggacagggtcactattacttgtcaggccagccaagatatctcgaactatctgaactggtatcagcagaagcctggaaaagcgcctaagctccttatctatgatgcgtccaatcttgagacaggggtgccgtcgcggttttccggttcagggtcgggaacggacttcacgtttacaatctccagcctgcagccggaggacgaagccacctacttctgccaacacttcgaccatttgcctcttgcgttcggaggtgggacaaaggtggagatcaagcgaact

SEQ ID NO: 349 - protein, 971 aa, Artificial Sequence
  source: /note="Description of Artificial Sequence: Synthetic polypeptide"
EVQLVESGGGLVQPGGSLRLSCAASGYTFTSYWLHWVRQAPGKGLEWVGMIDPSNSDTRFNPNFKDRFTISADTSKNTAYLQMNSLRAEDTAVYYCARYGSYVSPLDYWGQGTLVTVSSASTKGPSVFPLAPSSKSTSGGTAALGCLVKDYFPEPVTVSWNSGALTSGVHTFPAVLQSSGLYSLSSVVTVPSSSLGTQTYICNVNHKPSNTKVDKKVEPKSCDKTHTCPSCPAPEFLGGPSVFLFPPKPKDTLMISRTPEVTCVVVDVSQEDPEVQFNWYVDGVEVHNAKTKPREEQFNSKYRVVSVLTVLHQDWLNGKEYKCKVSNKGLPSSIEKTISKAKGQPREPQVYTLPPSREEMTKNQVSLSCAVKGFYPSDIAVEWESNGQPENNYKTTPPVLDSDGSFFLVSKLTVDKSRWQQGNVFSCSVMHEALHNHYTQKSLSLSPGKTRPAPPSTATTAGSTPQPESASPSGKEPAASSPSSTNTGSCPSCPAPEFLGGPSVFLFPPKPKDTLMISRTPEVTCVVVDVSQEDPEVQFNWYVDGVEVHNAKTKPREEQFNSKYRVVSVLTVLHQDWLNGKEYKCKVSNKGLPSSIEKTISKAKGQPREPQVYTLPPSREEMTKNQVSLWCLVKGFYPSDIAVEWESNGQPENNYKTTPPVLDSDGSFFLYSKLTVDKSRWQQGNVFSCSVMHEALHNHYTQKSLSLSPGKGGGGSGGGGSQVQLQESGPGLVKPSETLSLTCTVSGGSVSSGDYYWTWIRQSPGKGLEWIGHIYYSGNTNYNPSLKSRLTISIDTSKTQFSLKLSSVTAADTAIYYCVRDRVTGAFDIWGQGTMVTSSASTGGGGSGGGGSGGGGSGGGGSDIQMTQSPSSLSASVGDRVTITCQASQDISNYLNWYQQKPGKAPKLLIYDASNLETGVPSRFSGSGSGTDFTFTISSLQPEDEATYFCQHFDHLPLAFGGGTKVEIKRT

SEQ ID NO: 350 - protein, 983 aa, Artificial Sequence
  source: /note="Description of Artificial Sequence: Synthetic polypeptide"
EVQLLESGGGLVQPGGSLRLSCAASGFTFSDYQMEWVRQAPGKGLEWVSYIYSSGGKTVYADSVKGRFTISRDNSKNTLYLQMNSLRAEDTAVYYCARLPRVGATIINDYWGQGTLVTVSSASTKGPSVFPLAPSSKSTSGGTAALGCLVKDYFPEPVTVSWNSGALTSGVHTFPAVLQSSGLYSLSSVVTVPSSSLGTQTYICNVNHKPSNTKVDKKVEPKSCDKTHTCPPCPAPELLGGPSVFLFPPKPKDTLMISRTPEVTCVVVDVSHEDPEVKFNWYVDGVEVHNAKTKPREEQYQSTYRVVSVLTVLHQDWLNGKEYKCKVSNKALPAPIEKTISKAKGQPREPQVYTLPPSREEMTKNQVSLSCAVKGFYPSDIAVEWESNGQPENNYKTTPPVLDSDGSFFLVSKLTVDKSRWQQGNVFSCSVMHEALHNHYTQKSLSLSKSCDKTGGGGSGGGGSGGGGSGGGGSGGGGSGGGGSGGGGSGGGGSCPPCPAPELLGGPSVFLFPPKPKDTLMISRTPEVTCVVVDVSHEDPEVKFNWYVDGVEVHNAKTKPREEQYQSTYRVVSVLTVLHQDWLNGKEYKCKVSNKALPAPIEKTISKAKGQPREPQVYTLPPSREEMTKNQVSLWCLVKGFYPSDIAVEWESNGQPENNYKTTPPVLDSDGSFFLYSKLTVDKSRWQQGNVFSCSVMHEALHNHYTQKSLSLSGECGGGGSGGGGSEVQLVQSGAEVKKPGSSVKVSCKASGGTFSSYAIGWVRQAPGQGLEWMGGIIPIFGIANYAQKFQGRVTITADESTSSAYMELSSLRSEDTAVYYCAREEGPYCSSTSCYAAFDIWGQGTLVTVSSASTGGGGSGGGGSGGGGSGGGGSQSVLTQDPAVSVALGQTVKITCQGDSLRSYFASWYQQKPGQAPTLVMYARNDRPAGVPDRFSGSKSGTSASLAISGLQPEDEADYYCAAWDDSLNGYLFGAGTKLTVL

SEQ ID NO: 351 - protein, 983 aa, Artificial Sequence [sequence omitted]

SEQ ID NO: 352 - protein, 975 aa, Artificial Sequence
  source: /note="Description of Artificial Sequence: Synthetic polypeptide"
EVQLLESGGGLVQPGGSLRLSCAASGFTFSDYQMEWVRQAPGKGLEWVSYIYSSGGKTVYADSVKGRFTISRDNSKNTLYLQMNSLRAEDTAVYYCARLPRVGATIINDYWGQGTLVTVSSASTKGPSVFPLAPSSKSTSGGTAALGCLVKDYFPEPVTVSWNSGALTSGVHTFPAVLQSSGLYSLSSVVTVPSSSLGTQTYICNVNHKPSNTKVDKKVEPKSCDKTHTCPPCPAPELLGGPSVFLFPPKPKDTLMISRTPEVTCVVVDVSHEDPEVKFNWYVDGVEVHNAKTKPREEQYQSTYRVVSVLTVLHQDWLNGKEYKCKVSNKALPAPIEKTISKAKGQPREPQVYTLPPSREEMTKNQVSLSCAVKGFYPSDIAVEWESNGQPENNYKTTPPVLDSDGSFFLVSKLTVDKSRWQQGNVFSCSVMHEALHNHYTQKSLSLSKSCDKTGGGGSGGGGSGGGGSGGGGSGGGGSGGGGSGGGGSGGGGSCPPCPAPELLGGPSVFLFPPKPKDTLMISRTPEVTCVVVDVSHEDPEVKFNWYVDGVEVHNAKTKPREEQYQSTYRVVSVLTVLHQDWLNGKEYKCKVSNKALPAPIEKTISKAKGQPREPQVYTLPPSREEMTKNQVSLWCLVKGFYPSDIAVEWESNGQPENNYKTTPPVLDSDGSFFLYSKLTVDKSRWQQGNVFSCSVMHEALHNHYTQKSLSLSGECGGGGSGGGGSQVKLEQSGAEVVKPGASVKLSCKASGFNIKDSYMHWLRQGPGQRLEWIGWIDPENGDTEYAPKFQGKATFTTDTSANTAYLGLSSLRPEDTAVYYCNEGTPTGPYYFDYWGQGTLVTVSSASTGGGGSGGGGSGGGGSGGGGSENVLTQSPSSMSVSVGDRVTIACSASSSVPYMHWLQQKPGKSPKLLIYLTSNLASGVPSRFSGSGSGTDYSLTISSVQPEDAATYYCQQRSSYPLTFGGGTKLEIK

SEQ ID NO: 353 - protein, 975 aa, Artificial Sequence
  source: /note="Description of Artificial Sequence: Synthetic polypeptide"
EVQLLESGGGLVQPGGSLRLSCAASGFTFSDYQMEWVRQAPGKGLEWVSYIYSSGGKTVYADSVKGRFTISRDNSKNTLYLQMNSLRAEDTAVYYCARLPRVGATIINDYWGQGTLVTVSSASTKGPSVFPLAPSSKSTSGGTAALGCLVKDYFPEPVTVSWNSGALTSGVHTFPAVLQSSGLYSLSSVVTVPSSSLGTQTYICNVNHKPSNTKVDKKVEPKSCDKTHTCPSCPAPEFLGGPSVFLFPPKPKDTLMISRTPEVTCVVVDVSQEDPEVQFNWYVDGVEVHNAKTKPREEQFNSKYRVVSVLTVLHQDWLNGKEYKCKVSNKGLPSSIEKTISKAKGQPREPQVYTLPPSREEMTKNQVSLSCAVKGFYPSDIAVEWESNGQPENNYKTTPPVLDSDGSFFLVSKLTVDKSRWQQGNVFSCSVMHEALHNHYTQKSLSLSKSCDKTGGGGSGGGGSGGGGSGGGGSGGGGSGGGGSGGGGSGGGGSCPSCPAPEFLGGPSVFLFPPKPKDTLMISRTPEVTCVVVDVSQEDPEVQFNWYVDGVEVHNAKTKPREEQFNSDYRVVSVLTVLHQDWLNGKEYKCKVSNKGLPSSIEKTISKAKGQPREPQVYTLPPSREEMTKNQVSLWCLVKGFYPSDIAVEWESNGQPENNYKTTPPVLDSDGSFFLYSKLTVDKSRWQQGNVFSCSVMHEALHNHYTQKSLSLSGECGGGGSGGGGSQVKLEQSGAEVVKPGASVKLSCKASGFNIKDSYMHWLRQGPGQRLEWIGWIDPENGDTEYAPKFQGKATFTTDTSANTAYLGLSSLRPEDTAVYYCNEGTPTGPYYFDYWGQGTLVTVSSASTGGGGSGGGGSGGGGSGGGGSENVLTQSPSSMSVSVGDRVTIACSASSSVPYMHWLQQKPGKSPKLLIYLTSNLASGVPSRFSGSGSGTDYSLTISSVQPEDAATYYCQQRSSYPLTFGGGTKLEIK

SEQ ID NO: 354 - protein, 980 aa, Artificial Sequence [sequence omitted]

SEQ ID NO: 355 - protein, 976 aa, Artificial Sequence [sequence omitted]

SEQ ID NO: 356 - protein, 980 aa, Artificial Sequence
  source: /note="Description of Artificial Sequence: Synthetic polypeptide"
QVKLEQSGAEVVKPGASVKLSCKASGFNIKDSYMHWLRQGPGQRLEWIGWIDPENGDTEYAPKFQGKATFTTDTSANTAYLGLSSLRPEDTAVYYCNEGTPTGPYYFDYWGQGTLVTVSSASTKGPSVFPLAPSSKSTSGGTAALGCLVKDYFPEPVTVSWNSGALTSGVHTFPAVLQSSGLYSLSSVVTVPSSSLGTQTYICNVNHKPSNTKVDKKVEPKSCDKTHTCPSCPAPEFLGGPSVFLFPPKPKDTLMISRTPEVTCVVVDVSQEDPEVQFNWYVDGVEVHNAKTKPREEQFNSKYRVVSVLTVLHQDWLNGKEYKCKVSNKGLPSSIEKTISKAKGQPREPQVYTLPPSREEMTKNQVSLSCAVKGFYPSDIAVEWESNGQPENNYKTTPPVLDSDGSFFLVSKLTVDKSRWQQGNVFSCSVMHEALHNHYTQKSLSLSKSCDKTGGGGSGGGGSGGGGSGGGGSGGGGSGGGGSGGGGSGGGGSCPSCPAPEFLGGPSVFLFPPKPKDTLMISRTPEVTCVVVDVSQEDPEVQFNWYVDGVEVHNAKTKPREEQFNSDYRVVSVLTVLHQDWLNGKEYKCKVSNKGLPSSIEKTISKAKGQPREPQVYTLPPSREEMTKNQVSLWCLVKGFYPSDIAVEWESNGQPENNYKTTPPVLDSDGSFFLYSKLTVDKSRWQQGNVFSCSVMHEALHNHYTQKSLSLSGECGGGGSGGGGSEVQLVESGGGLVQPGGSLRLSCAASGYTFTSYWLHWVRQAPGKGLEWVGMIDPSNSDTRFNPNFKDRFTISADTSKNTAYLQMNSLRAEDTAVYYCATYRSYVTPLDYWGQGTLVTVSSASTGGGGSGGGGSGGGGSGGGGSDIQMTQSPSSLSASVGDRVTITCKSSQSLLYTSSQKNYLAWYQQKPGKAPKLLIYWASTRESGVPSRFSGSGSGTDFTLTISSLQPEDFATYYCQQYYAYPWTFGQGTKVEIK

SEQ ID NO: 357 - protein, 492 aa, Artificial Sequence
  source: /note="Description of Artificial Sequence: Synthetic polypeptide"
DKTHTCPSCPAPEFLGGPSVFLFPPKPKDTLMISRTPEVTCVVVDVSQEDPEVQFNWYVDGVEVHNAKTKPREEQFNSTYRVVSVLTVLHQDWLNGKEYKCKVSNKGLPSSIEKTISKAKGQPREPQVYTLPPSREEMTKNQVSLSCAVKGFYPSDIAVEWESNGQPENNYKTTPPVLDSDGSFFLVSKLTVDKSRWQQGNVFSCSVMHEALHNHYTQKSLSLSKSCDKTGGGGSGGGGSGGGGSGGGGSGGGGSGGGGSGGGGSGGGGSCPSCPAPEFLGGPSVFLFPPKPKDTLMISRTPEVTCVVVDVSQEDPEVQFNWYVDGVEVHNAKTKPREEQFNSTYRVVSVLTVLHQDWLNGKEYKCKVSNKGLPSSIEKTISKAKGQPREPQVYTLPPSREEMTKNQVSLWCLVKGFYPSDIAVEWESNGQPENNYKTTPPVLDSDGSFFLYSKLTVDKSRWQQGNVFSCSVMHEALHNHYTQKSLSLSGEC

SEQ ID NO: 358 - DNA, 1482 bp, Artificial Sequence
  source: /note="Description of Artificial Sequence: Synthetic polynucleotide"
gacaaaacccacacatgcccctcatgtccagctccagagttcctgggaggaccaagcgtgttcctgtttccacctaagcctaaagataccctgatgatttccaggactccagaagtgacctgcgtggtggtggacgtgtctcaggaggaccccgaagtgcagttcaactggtacgtggacggcgtggaggtgcacaatgccaagacaaaacctcgggaggaacagtttaatagcacttacagagtggtgtctgtgctgactgtgctgcatcaggattggctgaacggaaaggaatacaagtgcaaagtgagtaataagggcctgccatctagtatcgagaaaacaatttccaaggctaaagggcagcctcgggaaccacaggtgtacaccctgcccccttcccgggaggaaatgactaagaaccaggtgtcactgagctgcgccgtgaaaggcttctacccttccgacatcgctgtggagtgggaatctaatgggcagccagaaaacaattataagaccacaccacccgtgctggactcagatgggagcttctttctggtgtctaagctgacagtggacaaaagtagatggcagcagggcaacgtgttttcctgctctgtgatgcacgaggccctgcacaatcattacactcagaaaagtctgtcactgagcaagtcctgtgataaaaccggcggaggaggcagcggaggaggagggtccggaggcgggggatctggcgggggaggcagtgggggaggcgggtcaggaggcgggggaagcggcgggggaggctccgggggaggcgggtcctgcccctcttgtcctgccccagagttcctgggaggcccatccgtgttcctgtttcctccaaagcccaaagacaccctgatgatctctaggacaccagaagtgacttgcgtggtggtggacgtgagtcaggaggaccccgaagtgcagttcaactggtatgtggatggcgtggaggtgcacaatgctaagacaaaacctcgggaggaacagtttaatagcacttacagagtggtgtctgtgctgactgtgctgcatcaggattggctgaacgggaaggagtataagtgcaaagtgagcaataagggactgccatctagtatcgagaaaaccattagcaaggccaaaggccagcccagggaacctcaggtgtataccctgccccctagccgcgaggaaatgacaaagaaccaggtgtccctgtggtgtctggtgaaaggattctatcccagtgacattgctgtggagtgggaatcaaatggccagcctgaaaacaattacaagactaccccacccgtgctggacagtgatggctcattctttctgtattcaaagctgaccgtggataaaagcagatggcagcagggaaacgtgttttcttgcagtgtgatgcatgaggctctgcacaatcattacacacagaagagcttaagcttaagcggcgagtgctgataa

SEQ ID NO: 359 - protein, 973 aa, Artificial Sequence
  source: /note="Description of Artificial Sequence: Synthetic polypeptide"
EVQLVESGGGLVQPGGSLRLSCAASGYTFTSYWLHWVRQAPGKGLEWVGMIDPSNSDTRFNPNFKDRFTISADTSKNTAYLQMNSLRAEDTAVYYCATYRSYVTPLDYWGQGTLVTVSSASTKGPSVFPLAPSSKSTSGGTAALGCLVKDYFPEPVTVSWNSGALTSGVHTFPAVLQSSGLYSLSSVVTVPSSSLGTQTYICNVNHKPSNTKVDKKVEPKSCDKTHTCPPCPAPELLGGPSVFLFPPKPKDTLMISRTPEVTCVVVDVSHEDPEVKFNWYVDGVEVHNAKTKPREEQYQSTYRVVSVLTVLHQDWLNGKEYKCKVSNKALPAPIEKTISKAKGQPREPQVYTLPPSREEMTKNQVSLSCAVKGFYPSDIAVEWESNGQPENNYKTTPPVLDSDGSFFLVSKLTVDKSRWQQGNVFSCSVMHEALHNHYTQKSLSLSKSCDKTGGGGSGGGGSGGGGSGGGGSGGGGSGGGGSGGGGSGGGGSCPPCPAPELLGGPSVFLFPPKPKDTLMISRTPEVTCVVVDVSHEDPEVKFNWYVDGVEVHNAKTKPREEQYQSTYRVVSVLTVLHQDWLNGKEYKCKVSNKALPAPIEKTISKAKGQPREPQVYTLPPSREEMTKNQVSLWCLVKGFYPSDIAVEWESNGQPENNYKTTPPVLDSDGSFFLYSKLTVDKSRWQQGNVFSCSVMHEALHNHYTQKSLSLSGECGGGGSGGGGSQVKLEQSGAEVVKPGASVKLSCKASGFNIKDSYMHWLRQGPGQRLEWIGWIDPENGDTEYAPKFQGKATFTTDTSANTAYLGLSSLRPEDTAVYYCNEGTPTGPYYFDYWGQGTLVTVSSASTGGGGSGGGGSGGGGSGGGGSENVLTQSPSSMSVSVGDRVTIACSASSSVPYMHWLQQKPGKSPKLLIYLTSNLASGVPSRFSGSGSGTDYSLTISSVQPEDAATYYCQQRSSYPLTFGGGTKLEIK

SEQ ID NO: 360 - protein, 973 aa, Artificial Sequence
  source: /note="Description of Artificial Sequence: Synthetic polypeptide"
EVQLVESGGGLVQPGGSLRLSCAASGYTFTSYWLHWVRQAPGKGLEWVGMIDPSNSDTRFNPNFKDRFTISADTSKNTAYLQMNSLRAEDTAVYYCATYRSYVTPLDYWGQGTLVTVSSASTKGPSVFPLAPSSKSTSGGTAALGCLVKDYFPEPVTVSWNSGALTSGVHTFPAVLQSSGLYSLSSVVTVPSSSLGTQTYICNVNHKPSNTKVDKKVEPKSCDKTHTCPSCPAPEFLGGPSVFLFPPKPKDTLMISRTPEVTCVVVDVSQEDPEVQFNWYVDGVEVHNAKTKPREEQFNSKYRVVSVLTVLHQDWLNGKEYKCKVSNKGLPSSIEKTISKAKGQPREPQVYTLPPSREEMTKNQVSLSCAVKGFYPSDIAVEWESNGQPENNYKTTPPVLDSDGSFFLVSKLTVDKSRWQQGNVFSCSVMHEALHNHYTQKSLSLSKSCDKTGGGGSGGGGSGGGGSGGGGSGGGGSGGGGSGGGGSGGGGSCPSCPAPEFLGGPSVFLFPPKPKDTLMISRTPEVTCVVVDVSQEDPEVQFNWYVDGVEVHNAKTKPREEQFNSDYRVVSVLTVLHQDWLNGKEYKCKVSNKGLPSSIEKTISKAKGQPREPQVYTLPPSREEMTKNQVSLWCLVKGFYPSDIAVEWESNGQPENNYKTTPPVLDSDGSFFLYSKLTVDKSRWQQGNVFSCSVMHEALHNHYTQKSLSLSGECGGGGSGGGGSQVKLEQSGAEVVKPGASVKLSCKASGFNIKDSYMHWLRQGPGQRLEWIGWIDPENGDTEYAPKFQGKATFTTDTSANTAYLGLSSLRPEDTAVYYCNEGTPTGPYYFDYWGQGTLVTVSSASTGGGGSGGGGSGGGGSGGGGSENVLTQSPSSMSVSVGDRVTIACSASSSVPYMHWLQQKPGKSPKLLIYLTSNLASGVPSRFSGSGSGTDYSLTISSVQPEDAATYYCQQRSSYPLTFGGGTKLEIK

SEQ ID NO: 361 - protein, 967 aa, Artificial Sequence [sequence omitted]

SEQ ID NO: 362 - protein, 967 aa, Artificial Sequence
  source: /note="Description of Artificial Sequence: Synthetic polypeptide"
EVQLVESGGGLVQPGGSLRLSCAASGYTFTSYWLHWVRQAPGKGLEWVGMIDPSNSDTRFNPNFKDRFTISADTSKNTAYLQMNSLRAEDTAVYYCATYRSYVTPLDYWGQGTLVTVSSASTKGPSVFPLAPSSKSTSGGTAALGCLVKDYFPEPVTVSWNSGALTSGVHTFPAVLQSSGLYSLSSVVTVPSSSLGTQTYICNVNHKPSNTKVDKKVEPKSCDKTHTCPPCPAPELLGGPSVFLFPPKPKDTLMISRTPEVTCVVVDVSHEDPEVKFNWYVDGVEVHNAKTKPREEQYQSTYRVVSVLTVLHQDWLNGKEYKCKVSNKALPAPIEKTISKAKGQPREPQVYTLPPSREEMTKNQVSLSCAVKGFYPSDIAVEWESNGQPENNYKTTPPVLDSDGSFFLVSKLTVDKSRWQQGNVFSCSVMHEALHNHYTQKSLSLSKSCDKTGGGGSGGGGSGGGGSGGGGSGGGGSGGGGSGGGGSGGGGSCPPCPAPELLGGPSVFLFPPKPKDTLMISRTPEVTCVVVDVSHEDPEVKFNWYVDGVEVHNAKTKPREEQYQSTYRVVSVLTVLHQDWLNGKEYKCKVSNKALPAPIEKTISKAKGQPREPQVYTLPPSREEMTKNQVSLWCLVKGFYPSDIAVEWESNGQPENNYKTTPPVLDSDGSFFLYSKLTVDKSRWQQGNVFSCSVMHEALHNHYTQKSLSLSGECGGGGSGGGGSEVQLVESGGGLVKPGGSLRLSCAASGFTFSSYDMSWVRQAPGKGLEWVSTISSGGSYTYYLDSIKGRFTISRDNAKNSLYLQMNSLRAEDTAVYYCARQGLDYWGRGTLVTVSSASTGGGGSGGGGSGGGGSGGGGSEIVLTQSPATLSLSPGERATLSCSASSSINYIYWYQQKPGQAPRLLIYLTSNLASGVPARFSGSGSGTDFTLTISSLEPEDFAVYYCLQWSSNPLTFGGGTKVEIK

SEQ ID NO: 363 - protein, 978 aa, Artificial Sequence [sequence omitted]

SEQ ID NO: 364 - protein, 978 aa, Artificial Sequence
  source: /note="Description of Artificial Sequence: Synthetic polypeptide"
EVQLVESGGGLVQPGGSLRLSCAASGYTFTSYWLHWVRQAPGKGLEWVGMIDPSNSDTRFNPNFKDRFTISADTSKNTAYLQMNSLRAEDTAVYYCATYRSYVTPLDYWGQGTLVTVSSASTKGPSVFPLAPSSKSTSGGTAALGCLVKDYFPEPVTVSWNSGALTSGVHTFPAVLQSSGLYSLSSVVTVPSSSLGTQTYICNVNHKPSNTKVDKKVEPKSCDKTHTCPSCPAPEFLGGPSVFLFPPKPKDTLMISRTPEVTCVVVDVSQEDPEVQFNWYVDGVEVHNAKTKPREEQFNSKYRVVSVLTVLHQDWLNGKEYKCKVSNKGLPSSIEKTISKAKGQPREPQVYTLPPSREEMTKNQVSLSCAVKGFYPSDIAVEWESNGQPENNYKTTPPVLDSDGSFFLVSKLTVDKSRWQQGNVFSCSVMHEALHNHYTQKSLSLSKSCDKTGGGGSGGGGSGGGGSGGGGSGGGGSGGGGSGGGGSGGGGSCPSCPAPEFLGGPSVFLFPPKPKDTLMISRTPEVTCVVVDVSQEDPEVQFNWYVDGVEVHNAKTKPREEQFNSDYRVVSVLTVLHQDWLNGKEYKCKVSNKGLPSSIEKTISKAKGQPREPQVYTLPPSREEMTKNQVSLWCLVKGFYPSDIAVEWESNGQPENNYKTTPPVLDSDGSFFLYSKLTVDKSRWQQGNVFSCSVMHEALHNHYTQKSLSLSGECGGGGSGGGGSEVQLVESGGGLVQPGGSLRLSCAASGFDFSRYWMSWVRQAPGKGLVWVGEVNPDSTSINYTPSLKDRFTISRDNAKNTLYLQMNSLRAEDTAVYYCTRPNYYGSRYHYYAMDYWGQGTLVTVSSASTGGGGSGGGGSGGGGSGGGGSDIQMTQSPSSLSASVGDRVTITCRASQDINNYLNWYQQKPGKAPKLLIYYTSRLHSGVPSRFSGSGSGTDFTFTISSLQPEDIATYYCQQGSTLPFTFGQGTKLEIK

SEQ ID NO: 365 - protein, 983 aa, Artificial Sequence
  source: /note="Description of Artificial Sequence: Synthetic polypeptide"
EVQLVESGGGLVQPGGSLRLSCAASGFDFSRYWMSWVRQAPGKGLVWVGEVNPDSTSINYTPSLKDRFTISRDNAKNTLYLQMNSLRAEDTAVYYCTRPNYYGSRYHYYAMDYWGQGTLVTVSSASTKGPSVFPLAPSSKSTSGGTAALGCLVKDYFPEPVTVSWNSGALTSGVHTFPAVLQSSGLYSLSSVVTVPSSSLGTQTYICNVNHKPSNTKVDKKVEPKSCDKTHTCPPCPAPELLGGPSVFLFPPKPKDTLMISRTPEVTCVVVDVSHEDPEVKFNWYVDGVEVHNAKTKPREEQYQSTYRVVSVLTVLHQDWLNGKEYKCKVSNKALPAPIEKTISKAKGQPREPQVYTLPPSREEMTKNQVSLSCAVKGFYPSDIAVEWESNGQPENNYKTTPPVLDSDGSFFLVSKLTVDKSRWQQGNVFSCSVMHEALHNHYTQKSLSLSKSCDKTGGGGSGGGGSGGGGSGGGGSGGGGSGGGGSGGGGSGGGGSCPPCPAPELLGGPSVFLFPPKPKDTLMISRTPEVTCVVVDVSHEDPEVKFNWYVDGVEVHNAKTKPREEQYQSTYRVVSVLTVLHQDWLNGKEYKCKVSNKALPAPIEKTISKAKGQPREPQVYTLPPSREEMTKNQVSLWCLVKGFYPSDIAVEWESNGQPENNYKTTPPVLDSDGSFFLYSKLTVDKSRWQQGNVFSCSVMHEALHNHYTQKSLSLSGECGGGGSGGGGEVQLVESGGGLVQPGGSLRLSCAASGYTFTSYWLHWVRQAPGKGLEWVGMIDPSNSDTRFNPNFKDRFTISADTSKNTAYLQMNSLRAEDTAVYYCATYRSYVTPLDYWGQGTLVTVSSASTGGGGSGGGGSGGGGSGGGGSDIQMTQSPSSLSASVGDRVTITCKSSQSLLYTSSQKNYLAWYQQKPGKAPKLLIYWASTRESGVPSRFSGSGSGTDFTLTISSLQPEDFATYYCQQYYAYPWTFGQGTKVEIK

SEQ ID NO: 366 - protein, 984 aa, Artificial Sequence [sequence omitted]

SEQ ID NO: 367 - protein, 214 aa, Artificial Sequence
  source: /note="Description of Artificial Sequence: Synthetic polypeptide"
DIQMTQSPSSLSASVGDRVTITCRASQDINNYLNWYQQKPGKAPKLLIYYTSRLHSGVPSRFSGSGSGTDFTFTISSLQPEDIATYYCQQGSTLPFTFGQGTKLEIKRTVAAPSVFIFPPSDEQLKSGTASVVCLLNNFYPREAKVQWKVDNALQSGNSQESVTEQDSKDSTYSLSSTLTLSKADYEKHKVYACEVTHQGLSSPVTKSFNRGEC

SEQ ID NO: 368 - protein, 711 aa, Artificial Sequence
  source: /note="Description of Artificial Sequence: Synthetic polypeptide"
EVQLVESGGGLVQPGGSLRLSCAASGYTFTSYWLHWVRQAPGKGLEWVGMIDPSNSDTRFNPNFKDRFTISADTSKNTAYLQMNSLRAEDTAVYYCATYRSYVTPLDYWGQGTLVTVSSASTKGPSVFPLAPSSKSTSGGTAALGCLVKDYFPEPVTVSWNSGALTSGVHTFPAVLQSSGLYSLSSVVTVPSSSLGTQTYICNVNHKPSNTKVDKKVEPKSCDKTHTCPPCPAPELLGGPSVFLFPPKPKDTLMISRTPEVTCVVVDVSHEDPEVKFNWYVDGVEVHNAKTKPREEQYQSTYRVVSVLTVLHQDWLNGKEYKCKVSNKALPAPIEKTISKAKGQPREPQVYTLPPSREEMTKNQVSLSCAVKGFYPSDIAVEWESNGQPENNYKTTPPVLDSDGSFFLVSKLTVDKSRWQQGNVFSCSVMHEALHNHYTQKSLSLSPGKGGGGSGGGGSGGGGSGGGGSGGGGSGGGGSGGGGSGGGGSCPPCPAPELLGGPSVFLFPPKPKDTLMISRTPEVTCVVVDVSHEDPEVKFNWYVDGVEVHNAKTKPREEQYQSTYRVVSVLTVLHQDWLNGKEYKCKVSNKALPAPIEKTISKAKGQPREPQVYTLPPSREEMTKNQVSLWCLVKGFYPSDIAVEWESNGQPENNYKTTPPVLDSDGSFFLYSKLTVDKSRWQQGNVFSCSVMHEALHNHYTQKSLSLSPGK

SEQ ID NO: 369 - DNA, 2139 bp, Artificial Sequence
  source: /note="Description of Artificial Sequence: Synthetic polynucleotide"
gaggtgcagttggtagaatcaggagggggtctggtccaacccggaggaagcctcagactcagctgtgcggcttcgggttacacctttacctcctattggttgcactgggtgagacaggcacctggcaaagggctcgaatgggtcggaatgatcgacccctccaactcagatacgcggtttaacccgaatttcaaggatcgattcacgatctcagcagacacatcgaaaaacacagcgtacctccagatgaattcgttgagggccgaggacacggcggtgtattactgcgccacgtatcgcagctatgtaactccattggattactgggggcagggtactcttgtgacagtctcctcggctagcaccaagggacccagcgtgtttccacttgcgccttcgtcaaagtccacaagcgggggaacggcagcccttggctgcctggtgaaagactactttcccgaacccgtgacagtatcgtggaatagcggagcgctcacatcgggcgtgcacacatttccggcggtgctgcagtcctccgggttgtattcgctgtcgagcgtagtcacggtgccgtcctcgtcactgggaactcagacatacatttgcaacgtcaatcacaaaccgtcaaacacgaaagtcgacaagaaagtggaaccgaaatcatgcgacaagacccacacttgtcccccatgtcctgccccagagcttctcgggggaccctcggtgttcttgttcccgccgaaaccgaaagatactctcatgatcagcagaacacccgaagtcacgtgtgtcgtggtagatgtctcccacgaggaccccgaggtgaagtttaactggtatgtagacggggtagaggtacataatgcgaaaacaaaaccccgcgaagaacagtaccagtcaacttatcgcgtcgtgtcagtactcacggtcttgcatcaggactggttgaacgggaaggagtacaaatgtaaggtatcaaacaaggccctcccagcgccgattgagaaaacgatctcgaaagcgaaaggacagcccagggagccgcaagtatacactcttccgccatcacgggaggagatgactaagaaccaagtcagcctgagctgcgcggtgaaagggttctatccgtcggatattgcggtggaatgggagtcgaacggccagccggagaacaattacaaaaccacgccacccgtcctcgacagcgacggatcgttctttctggtgagcaagttgaccgtcgataagtcgcggtggcaacagggtaatgtgttttcatgctcagtgatgcatgaggccttgcacaatcattacacacagaagtccctcagcctttcgcctggcaaaggtgggggtgggtcgggagggggaggatcaggtggtggagggtcaggaggtgggggatcaggagggggtgggagcgggggaggcgggtccggaggaggcggcagcgggggtgggggctcgtgtcccccttgtccggcacccgagctcttgggaggaccttcagtgtttctttttccgcccaaacccaaagatacccttatgatctcgcgaacccctgaagtcacatgcgtggtcgtggatgtatcgcatgaggacccggaggtcaagttcaattggtacgtggacggggtcgaggtgcacaacgctaagacaaaacctcgggaggagcagtatcagtccacatatagggtcgtgtccgtactgacggtacttcatcaggattggctcaatgggaaagaatacaagtgcaaggtgtcgaataaggcgttgcctgcacccattgaaaagacgatttcgaaagctaagggtcaacccagagaaccccaagtctatacgcttcccccttcccgcgaggaaatgacgaagaatcaggtcagcctctggtgcctggtgaaggggttctacccctccgacatcgccgtagagtgggaatccaatgggcagcccgaaaacaactacaagacgacaccgcctgtgttggattcagatgggagcttctttctctattccaaactgacggtggacaaaagcaggtggcagcaaggaaatgtgttctcgtgctcggtaatgcacgaagcactgcacaaccactacacccagaagtccttgtccctttcgccaggaaaataatag

SEQ ID NO: 370 - protein, 711 aa, Artificial Sequence
  source: /note="Description of Artificial Sequence: Synthetic polypeptide"
EVQLVESGGGLVQPGGSLRLSCAASGYTFTSYWLHWVRQAPGKGLEWVGMIDPSNSDTRFNPNFKDRFTISADTSKNTAYLQMNSLRAEDTAVYYCATYRSYVTPLDYWGQGTLVTVSSASTKGPSVFPLAPSSKSTSGGTAALGCLVKDYFPEPVTVSWNSGALTSGVHTFPAVLQSSGLYSLSSVVTVPSSSLGTQTYICNVNHKPSNTKVDKKVEPKSCDKTHTCPSCPAPEFLGGPSVFLFPPKPKDTLMISRTPEVTCVVVDVSQEDPEVQFNWYVDGVEVHNAKTKPREEQFNSKYRVVSVLTVLHQDWLNGKEYKCKVSNKGLPSSIEKTISKAKGQPREPQVYTLPPSREEMTKNQVSLSCAVKGFYPSDIAVEWESNGQPENNYKTTPPVLDSDGSFFLVSKLTVDKSRWQQGNVFSCSVMHEALHNHYTQKSLSLSPGKGGGGSGGGGSGGGGSGGGGSGGGGSGGGGSGGGGSGGGGSCPSCPAPEFLGGPSVFLFPPKPKDTLMISRTPEVTCVVVDVSQEDPEVQFNWYVDGVEVHNAKTKPREEQFNSKYRVVSVLTVLHQDWLNGKEYKCKVSNKGLPSSIEKTISKAKGQPREPQVYTLPPSREEMTKNQVSLWCLVKGFYPSDIAVEWESNGQPENNYKTTPPVLDSDGSFFLYSKLTVDKSRWQQGNVFSCSVMHEALHNHYTQKSLSLSPGK

SEQ ID NO: 371 - DNA, 2138 bp, Artificial Sequence
  source: /note="Description of Artificial Sequence: Synthetic polynucleotide"
gaggtgcagttggtagaatcaggagggggtctggtccaacccggaggaagcctcagactcagctgtgcggcttcgggttacacctttacctcctattggttgcactgggtgagacaggcacctggcaaagggctcgaatgggtcggaatgatcgacccctccaactcagatacgcggtttaacccgaatttcaaggatcgattcacgatctcagcagacacatcgaaaaacacagcgtacctccagatgaattcgttgagggccgaggacacggcggtgtattactgcgccacgtatcgcagctatgtaactccattggattactgggggcagggtactcttgtgacagtctcctcggctagcaccaagggacccagcgtgtttccacttgcgccttcgtcaaagtccacaagcgggggaacggcagcccttggctgcctggtgaaagactactttcccgaacccgtgacagtatcgtggaatagcggagcgctcacatcgggcgtgcacacatttccggcggtgctgcagtcctccgggttgtattcgctgtcgagcgtagtcacggtgccgtcctcgtcactgggaactcagacatacatttgcaacgtcaatcacaaaccgtcaaacacgaaagtcgacaaaaaggtggaacctaagtcgtgcgacaaaacacacacctgcccgtcgtgtccagcgcctgagttcttgggtggtccctcggtgtttctttttccgcctaagcccaaagacacgctcatgatttcgcgcacacccgaagtcacatgcgtggtggtggatgtgagccaggaagatccggaggtacagttcaattggtatgtcgatggggtggaggtacataatgccaagacgaaaccgagggaggagcagttcaactccaagtatagggtggtgtcagtcttgactgtgttgcaccaagattggcttaacggaaaagagtataagtgtaaagtatcgaacaagggactccccagctcaatcgaaaagacgatctcaaaggcgaaaggtcagccacgagaaccccaagtatacacgctgcctccatcgcgggaagaaatgacgaaaaaccaagtatcgctttcatgcgctgtgaaggggttctacccgtcggacattgccgtggaatgggaaagcaatgggcagccagagaataactataagactacgcccccagtcttggacagcgacgggagctttttcctggtgtccaagttgacagtggacaaatcgcgctggcagcagggaaatgtgttttcctgttccgtaatgcatgaagcactccataatcactacacacagaaatcgctttcgctgtcacccgggaagggtgggggtgggtcgggagggggaggatcaggtggtggagggtcaggaggtgggggatcaggagggggtgggagcgggggaggcgggtccggaggaggcggcagcgggggtgggggctcgtgcccttcctgtcccgcacccgagttccttgggggaccgtcggtctttctcttccctccgaagcccaaggacaccttgatgatctcccggactcccgaagtgacgtgtgtcgtagtagacgtgtcgcaagaggaccccgaggtccagttcaactggtacgtcgatggcgtggaggtgcacaacgctaaaacaaagcccagagaagagcagtttaacagcaagtatcgggtcgtcagcgtgctgaccgtccttcatcaggactggcttaatggaaaggaatacaaatgtaaagtctcgaataaggggttgcccagctcgattgagaaaaccatctccaaagcgaaagggcagccaagagagcctcaagtctatacgcttcccccatcacgcgaagagatgactaagaatcaagtctccctgtggtgcctggtgaagggattctacccttcggatattgcggtggagtgggagtccaacggtcagccggagaacaattacaagacgactccgccggtactcgattcagatggatcattctttctctactccaaactcacagtagacaaatcgaggtggcaacagggaaacgtcttttcatgttcggtaatgcacgaggcccttcacaatcattacacccagaaatcactcagcctgtccccgggaaataatag

SEQ ID NO: 372 - protein, 714 aa, Artificial Sequence
  source: /note="Description of Artificial Sequence: Synthetic polypeptide"
EVQLVESGGGLVQPGGSLRLSCAASGYTFTSYWLHWVRQAPGKGLEWVGMIDPSNSDTRFNPNFKDRFTISADTSKNTAYLQMNSLRAEDTAVYYCATYRSYVTPLDYWGQGTLVTVSSASTKGPSVFPLAPSSKSTSGGTAALGCLVKDYFPEPVTVSWNSGALTSGVHTFPAVLQSSGLYSLSSVVTVPSSSLGTQTYICNVNHKPSNTKVDKKVEPKSCDKTHTCPPCPAPELLGGPSVFLFPPKPKDTLMISRTPEVTCVVVDVSHEDPEVKFNWYVDGVEVHNAKTKPREEQYQSTYRVVSVLTVLHQDWLNGKEYKCKVSNKALPAPIEKTISKAKGQPREPQVYTLPPSREEMTKNQVSLSCAVKGFYPSDIAVEWESNGQPENNYKTTPPVLDSDGSFFLVSKLTVDKSRWQQGNVFSCSVMHEALHNHYTQKSLSLSKSCDKTGGGGSGGGGSGGGGSGGGGSGGGGSGGGGSGGGGSGGGGSCPPCPAPELLGGPSVFLFPPKPKDTLMISRTPEVTCVVVDVSHEDPEVKFNWYVDGVEVHNAKTKPREEQYQSTYRVVSVLTVLHQDWLNGKEYKCKVSNKALPAPIEKTISKAKGQPREPQVYTLPPSREEMTKNQVSLWCLVKGFYPSDIAVEWESNGQPENNYKTTPPVLDSDGSFFLYSKLTVDKSRWQQGNVFSCSVMHEALHNHYTQKSLSLSGEC

SEQ ID NO: 373 - DNA, 2151 bp, Artificial Sequence
  source: /note="Description of Artificial Sequence: Synthetic polynucleotide"
gaggtgcagttggtagaatcaggagggggtctggtccaacccggaggaagcctcagactcagctgtgcggcttcgggttacacctttacctcctattggttgcactgggtgagacaggcacctggcaaagggctcgaatgggtcggaatgatcgacccctccaactcagatacgcggtttaacccgaatttcaaggatcgattcacgatctcagcagacacatcgaaaaacacagcgtacctccagatgaattcgttgagggccgaggacacggcggtgtattactgcgccacgtatcgcagctatgtaactccattggattactgggggcagggtactcttgtgacagtctcctcggctagcactaaggggcccagcgtctttccattggcgccctcgtcgaaatcaaccagcggaggaacagctgcgcttggttgcctcgtcaaagactacttccccgagccggtaacggtgtcgtggaactccggtgcgctgacatcaggggtgcacacgttccctgctgtccttcagtcaagcgggttgtactcgctctcgtccgtggtgacggtgccctccagctcgttgggcacgcagacttacatctgcaatgtgaaccataaacccagcaacactaaagtcgacaaaaaggtcgaaccaaaatcgtgcgataagacgcacacctgcccaccttgtccggctccggaactcttgggtggtccgtccgtattcttgttcccgcctaagccgaaggacactcttatgatttcgaggaccccggaggtcacgtgcgtcgtggtggatgtctcgcatgaggacccggaagtcaaattcaactggtacgtagacggtgtcgaggtgcataacgcaaagaccaagcccagggaagagcagtaccagtccacgtaccgggtagtgtcggtgctcaccgtgcttcaccaggactggcttaacgggaaggaatacaagtgtaaagtctccaacaaagcgctccctgcccccatcgaaaagaccatttcgaaagcgaaagggcagccacgcgagcctcaagtgtacaccctgccgccgtcccgggaagagatgactaagaatcaggtatccctctcatgcgctgtcaagggtttctacccgtcagacatcgcagtggaatgggaatcaaacggccagccggagaataactacaagacgacgccgcctgtcctcgattccgacgggtcgttcttcctggtgtcgaagttgacagtggacaagtcgcgatggcagcaaggaaacgtcttctcatgctcggtaatgcacgaggcgctccataaccactatacacagaaatcgctctccttgtcaaagtcgtgcgataagacgggagggggtggatcaggtgggggaggctcgggagggggaggaagcggtggaggagggtcaggaggaggaggcagcgggggcggtggttccggtggtgggggatcaggcggaggcggctcatgcccgccttgtcccgcaccagaactgcttggagggccttcggtctttctctttcccccgaaacccaaagacaccctgatgatctcacgcactcccgaagtcacatgtgtagtcgtcgatgtgtcgcatgaagatccggaggtgaagttcaattggtacgtagatggggtcgaagtgcataatgcaaagacgaaaccgcgagaggagcagtatcagtcaacgtatcgcgtagtaagcgtgttgacggtgctccatcaggattggttgaatggtaaagagtacaagtgcaaggtgtcaaacaaagcgttgccggcccctattgaaaagaccatctcaaaagccaaggggcaaccccgagagccccaagtatacactctcccgccttcgagagaggagatgactaaaaaccaggtgtcgctttggtgtttggtgaaggggttctatccctcggatatcgccgtcgagtgggaatccaatgggcaacccgaaaacaactataagacaacgcctccagtactggactccgacggctcctttttcttgtactccaaattgacggtggataagtcgcggtggcagcaggggaatgtgttttcgtgtagcgtgatgcatgaagccctgcataaccactatactcaaaagtcactttccctgtcgggtgaatgctgataatct

SEQ ID NO: 374 - protein, 714 aa, Artificial Sequence
  source: /note="Description of Artificial Sequence: Synthetic polypeptide"
EVQLVESGGGLVQPGGSLRLSCAASGYTFTSYWLHWVRQAPGKGLEWVGMIDPSNSDTRFNPNFKDRFTISADTSKNTAYLQMNSLRAEDTAVYYCATYRSYVTPLDYWGQGTLVTVSSASTKGPSVFPLAPSSKSTSGGTAALGCLVKDYFPEPVTVSWNSGALTSGVHTFPAVLQSSGLYSLSSVVTVPSSSLGTQTYICNVNHKPSNTKVDKKVEPKSCDKTHTCPSCPAPEFLGGPSVFLFPPKPKDTLMISRTPEVTCVVVDVSQEDPEVQFNWYVDGVEVHNAKTKPREEQFNSKYRVVSVLTVLHQDWLNGKEYKCKVSNKGLPSSIEKTISKAKGQPREPQVYTLPPSREEMTKNQVSLSCAVKGFYPSDIAVEWESNGQPENNYKTTPPVLDSDGSFFLVSKLTVDKSRWQQGNVFSCSVMHEALHNHYTQKSLSLSKSCDKTGGGGSGGGGSGGGGSGGGGSGGGGSGGGGSGGGGSGGGGSCPSCPAPEFLGGPSVFLFPPKPKDTLMISRTPEVTCVVVDVSQEDPEVQFNWYVDGVEVHNAKTKPREEQFNSDYRVVSVLTVLHQDWLNGKEYKCKVSNKGLPSSIEKTISKAKGQPREPQVYTLPPSREEMTKNQVSLWCLVKGFYPSDIAVEWESNGQPENNYKTTPPVLDSDGSFFLYSKLTVDKSRWQQGNVFSCSVMHEALHNHYTQKSLSLSGEC

SEQ ID NO: 375 - DNA, 2160 bp, Artificial Sequence
  source: /note="Description of Artificial Sequence: Synthetic polynucleotide"
gaggtgcagttggtagaatcaggagggggtctggtccaacccggaggaagcctcagactcagctgtgcggcttcgggttacacctttacctcctattggttgcactgggtgagacaggcacctggcaaagggctcgaatgggtcggaatgatcgacccctccaactcagatacgcggtttaacccgaatttcaaggatcgattcacgatctcagcagacacatcgaaaaacacagcgtacctccagatgaattcgttgagggccgaggacacggcggtgtattactgcgccacgtatcgcagctatgtaactccattggattactgggggcagggtactcttgtgacagtctcctcggctagcactaagggaccttccgtgttcccactggccccctcaagcaaatctaccagtgggggaacagcagccctgggctgtctggtgaaggattactttccagagcccgtgaccgtcagttggaactcaggggctctgactagcggagtgcacaccttccccgcagtcctgcagtcctctgggctgtactccctgagttcagtggtcactgtgcccagctcctctctgggaacacagacttatatctgcaacgtgaatcacaagccttccaataccaaagtcgacaagaaagtcgagcctaagtcatgtgataaaacccatacatgcccaagctgtcctgcaccagaatttctgggaggaccaagcgtgttcctgtttccacctaagcctaaagacaccctgatgattagtcgcactccagaggtgacctgtgtggtcgtggacgtcagccaggaggatcccgaagtgcagtttaactggtacgtcgatggcgtggaagtccacaatgctaagacaaaaccaagagaggaacagttcaacagcaagtacagggtcgtgtccgtgctgactgtcctgcatcaggactggctgaacggaaaagagtataagtgcaaagtgagcaataagggcctgcccagttcaatcgagaaaacaatttccaaggcaaaaggccagcctcgggaaccacaggtgtataccctgccacccagcagagaggaaatgacaaagaaccaggtgtcactgagctgtgccgtcaaaggcttttaccctagcgatatcgctgtggagtgggaatccaatgggcagccagaaaacaattataagaccacacctccagtgctggacagcgatggatccttctttctggtgtccaagctgaccgtggacaaatctcggtggcagcagggcaacgtgttctcctgctctgtcatgcatgaggccctgcacaatcattacacccagaaaagtctgtcactgagcaagtcctgtgataaaacaggaggcgggggatctggcgggggaggcagtgggggaggcgggtccggaggaggaggaagcggaggaggaggatccggaggaggcgggtctggaggcgggggaagtggaggaggaggatcttgcccaagttgtccagcacctgagttcctgggaggaccatccgtgttcctgtttccccctaagcccaaagacaccctgatgatcagccggacacctgaagtgacttgcgtcgtggtggacgtgtcccaggaggatccagaggtccagtttaactggtatgtcgatggcgtggaggtccacaatgctaagaccaaacctcgcgaggaacagttcaactctgactaccgagtggtcagtgtgctgacagtcctgcatcaggattggctgaacgggaaggaatacaaatgtaaagtgagcaataagggactgccaagctccatcgagaagaccatcagcaaagccaaaggccagcccagggaacctcaggtgtacactctgccaccctcccgcgaggaaatgaccaagaaccaggtgtctctgtggtgtctggtcaaaggattttatccctctgacatcgccgtggagtgggaaagtaatggccagcctgaaaacaattacaagactacccctccagtgctggactcagatgggagcttctttctgtatagtaagctgaccgtggataaatcacggtggcagcagggaaatgtgttctcttgcagtgtcatgcacgaggccctgcataaccattacacacagaagtcattaagcttatccggagagtgttgataatctagactcgag

SEQ ID NO: 376 - protein, 973 aa, Artificial Sequence
  source: /note="Description of Artificial Sequence: Synthetic polypeptide"
EVQLVESGGGLVQPGGSLRLSCAASGYTFTSYWLHWVRQAPGKGLEWVGMIDPSNSDTRFNPNFKDRFTISADTSKNTAYLQMNSLRAEDTAVYYCATYRSYVTPLDYWGQGTLVTVSSASTKGPSVFPLAPSSKSTSGGTAALGCLVKDYFPEPVTVSWNSGALTSGVHTFPAVLQSSGLYSLSSVVTVPSSSLGTQTYICNVNHKPSNTKVDKKVEPKSCDKTHTCPPCPAPELLGGPSVFLFPPKPKDTLMISRTPEVTCVVVDVSHEDPEVKFNWYVDGVEVHNAKTKPREEQYQSTYRVVSVLTVLHQDWLNGKEYKCKVSNKALPAPIEKTISKAKGQPREPQVYTLPPSREEMTKNQVSLSCAVKGFYPSDIAVEWESNGQPENNYKTTPPVLDSDGSFFLVSKLTVDKSRWQQGNVFSCSVMHEALHNHYTQKSLSLSKSCDKTGGGGSGGGGSGGGGSGGGGSGGGGSGGGGSGGGGSGGGGSCPPCPAPELLGGPSVFLFPPKPKDTLMISRTPEVTCVVVDVSHEDPEVKFNWYVDGVEVHNAKTKPREEQYQSTYRVVSVLTVLHQDWLNGKEYKCKVSNKALPAPIEKTISKAKGQPREPQVYTLPPSREEMTKNQVSLWCLVKGFYPSDIAVEWESNGQPENNYKTTPPVLDSDGSFFLYSKLTVDKSRWQQGNVFSCSVMHEALHNHYTQKSLSLSGECGGGGSGGGGSQVQLVESGGGVVQPGESLRISCAVSGFSLTNYGVHWVRQAPGKGLEWLGVIWSGGNTDYNTPFTSRLTISKDNSKSTVYFQMNSLRAEDTAVYYCARALTYYDYEFAYWGQGTLVTVSSASTGGGGSGGGGSGGGGSGGGGSDIVLTQSPSSLSVTPGEKVTFTCRASQSIGTNIHWYQQKPGQSPKLLIKYASESISGVPSRFSGSGSGTDFTLTINSVEAEDAATYYCQQNNNWPTTFGQGTKLEIK

SEQ ID NO: 377 - DNA, 2925 bp, Artificial Sequence
  source: /note="Description of Artificial Sequence: Synthetic polynucleotide"
gaggtgcagttggtagaatcaggagggggtctggtccaacccggaggaagcctcagactcagctgtgcggcttcgggttacacctttacctcctattggttgcactgggtgagacaggcacctggcaaagggctcgaatgggtcggaatgatcgacccctccaactcagatacgcggtttaacccgaatttcaaggatcgattcacgatctcagcagacacatcgaaaaacacagcgtacctccagatgaattcgttgagggccgaggacacggcggtgtattactgcgccacgtatcgcagctatgtaactccattggattactgggggcagggtactcttgtgacagtctcctcggctagcactaaggggcccagcgtctttccattggcgccctcgtcgaaatcaaccagcggaggaacagctgcgcttggttgcctcgtcaaagactacttccccgagccggtaacggtgtcgtggaactccggtgcgctgacatcaggggtgcacacgttccctgctgtccttcagtcaagcgggttgtactcgctctcgtccgtggtgacggtgccctccagctcgttgggcacgcagacttacatctgcaatgtgaaccataaacccagcaacactaaagtcgacaaaaaggtcgaaccaaaatcgtgcgataagacgcacacctgcccaccttgtccggctccggaactcttgggtggtccgtccgtattcttgttcccgcctaagccgaaggacactcttatgatttcgaggaccccggaggtcacgtgcgtcgtggtggatgtctcgcatgaggacccggaagtcaaattcaactggtacgtagacggtgtcgaggtgcataacgcaaagaccaagcccagggaagagcagtaccagtccacgtaccgggtagtgtcggtgctcaccgtgcttcaccaggactggcttaacgggaaggaatacaagtgtaaagtctccaacaaagcgctccctgcccccatcgaaaagaccatttcgaaagcgaaagggcagccacgcgagcctcaagtgtacaccctgccgccgtcccgggaagagatgactaagaatcaggtatccctctcatgcgctgtcaagggtttctacccgtcagacatcgcagtggaatgggaatcaaacggccagccggagaataactacaagacgacgccgcctgtcctcgattccgacgggtcgttcttcctggtgtcgaagttgacagtggacaagtcgcgatggcagcaaggaaacgtcttctcatgctcggtaatgcacgaggcgctccataaccactatacacagaaatcgctctccttgtcaaagtcgtgcgataagacgggagggggtggatcaggtgggggaggctcgggagggggaggaagcggtggaggagggtcaggaggaggaggcagcgggggcggtggttccggtggtgggggatcaggcggaggcggctcatgcccgccttgtcccgcaccagaactgcttggagggccttcggtctttctctttcccccgaaacccaaagacaccctgatgatctcacgcactcccgaagtcacatgtgtagtcgtcgatgtgtcgcatgaagatccggaggtgaagttcaattggtacgtagatggggtcgaagtgcataatgcaaagacgaaaccgcgagaggagcagtatcagtcaacgtatcgcgtagtaagcgtgttgacggtgctccatcaggattggttgaatggtaaagagtacaagtgcaaggtgtcaaacaaagcgttgccggcccctattgaaaagaccatctcaaaagccaaggggcaaccccgagagccccaagtatacactctcccgccttcgagagaggagatgactaaaaaccaggtgtcgctttggtgtttggtgaaggggttctatccctcggatatcgccgtcgagtgggaatccaatgggcaacccgaaaacaactataagacaacgcctccagtactggactccgacggctcctttttcttgtactccaaattgacggtggataagtcgcggtggcagcaggggaatgtgttttcgtgtagcgtgatgcatgaagccctgcataaccactatactcaaaagtcactttccctgtcgggtgaatgcggcggaggtgggtccgggggtgggggatcccaggtgcagctggtggagtctggaggaggagtggtgcagccaggagaatccctgaggatttcttgtgccgtgtcaggcttcagcctgactaattacggggtgcactgggtgcgccaggctccaggcaaagggctggagtggctgggcgtgatctggtccggagggaatacagactacaacacccctttcacaagtaggctgaccatttcaaaggataactcaaaaagcacagtgtatttccagatgaacagcctgcgggccgaggacacagccgtgtactattgcgccagagctctgacttactatgattacgaattcgcctattggggacagggcactctggtgaccgtgagcagcgccagcaccggaggaggaggaagcggcggaggaggctccggaggaggcgggtctggaggcgggggaagtgacatcgtgctgactcagtcaccatctagtctgagcgtgacccccggcgagaaagtgacttttacctgccgggcctcccagtctatcggaaccaatattcattggtatcagcagaaacccggccagtcccctaagctgctgatcaaatatgctagtgaatcaattagcggcgtgcccagccggttcagcgggtctggaagtggcaccgactttacactgactatcaacagtgtggaggccgaagatgccgctacatactattgtcagcagaacaataactggcctaccacatttgggcagggaacaaagctggagatcaagtgataa

SEQ ID NO: 378 - protein, 974 aa, Artificial Sequence [sequence omitted]

SEQ ID NO: 379 - DNA, 2928 bp, Artificial Sequence
  source: /note="Description of Artificial Sequence: Synthetic polynucleotide"
gaggtgcagttggtagaatcaggagggggtctggtccaacccggaggaagcctcagactcagctgtgcggcttcgggttacacctttacctcctattggttgcactgggtgagacaggcacctggcaaagggctcgaatgggtcggaatgatcgacccctccaactcagatacgcggtttaacccgaatttcaaggatcgattcacgatctcagcagacacatcgaaaaacacagcgtacctccagatgaattcgttgagggccgaggacacggcggtgtattactgcgccacgtatcgcagctatgtaactccattggattactgggggcagggtactcttgtgacagtctcctcggctagcactaaggggcccagcgtctttccattggcgccctcgtcgaaatcaaccagcggaggaacagctgcgcttggttgcctcgtcaaagactacttccccgagccggtaacggtgtcgtggaactccggtgcgctgacatcaggggtgcacacgttccctgctgtccttcagtcaagcgggttgtactcgctctcgtccgtggtgacggtgccctccagctcgttgggcacgcagacttacatctgcaatgtgaaccataaacccagcaacactaaagtcgacaaaaaggtcgaaccaaaatcgtgcgataagacgcacacctgcccaccttgtccggctccggaactcttgggtggtccgtccgtattcttgttcccgcctaagccgaaggacactcttatgatttcgaggaccccggaggtcacgtgcgtcgtggtggatgtctcgcatgaggacccggaagtcaaattcaactggtacgtagacggtgtcgaggtgcataacgcaaagaccaagcccagggaagagcagtaccagtccacgtaccgggtagtgtcggtgctcaccgtgcttcaccaggactggcttaacgggaaggaatacaagtgtaaagtctccaacaaagcgctccctgcccccatcgaaaagaccatttcgaaagcgaaagggcagccacgcgagcctcaagtgtacaccctgccgccgtcccgggaagagatgactaagaatcaggtatccctctcatgcgctgtcaagggtttctacccgtcagacatcgcagtggaatgggaatcaaacggccagccggagaataactacaagacgacgccgcctgtcctcgattccgacgggtcgttcttcctggtgtcgaagttgacagtggacaagtcgcgatggcagcaaggaaacgtcttctcatgctcggtaatgcacgaggcgctccataaccactatacacagaaatcgctctccttgtcaaagtcgtgcgataagacgggagggggtggatcaggtgggggaggctcgggagggggaggaagcggtggaggagggtcaggaggaggaggcagcgggggcggtggttccggtggtgggggatcaggcggaggcggctcatgcccgccttgtcccgcaccagaactgcttggagggccttcggtctttctctttcccccgaaacccaaagacaccctgatgatctcacgcactcccgaagtcacatgtgtagtcgtcgatgtgtcgcatgaagatccggaggtgaagttcaattggtacgtagatggggtcgaagtgcataatgcaaagacgaaaccgcgagaggagcagtatcagtcaacgtatcgcgtagtaagcgtgttgacggtgctccatcaggattggttgaatggtaaagagtacaagtgcaaggtgtcaaacaaagcgttgccggcccctattgaaaagaccatctcaaaagccaaggggcaaccccgagagccccaagtatacactctcccgccttcgagagaggagatgactaaaaaccaggtgtcgctttggtgtttggtgaaggggttctatccctcggatatcgccgtcgagtgggaatccaatgggcaacccgaaaacaactataagacaacgcctccagtactggactccgacggctcctttttcttgtactccaaattgacggtggataagtcgcggtggcagcaggggaatgtgttttcgtgtagcgtgatgcatgaagccctgcataaccactatactcaaaagtcactttccctgtcgggtgaatgcggcggaggtgggtccgggggtgggggatcccaagtccagttgcaagaaagcgggccaggactcgtgaaaccctcggaaaccctgtcactgacgtgcacggtgagcggagggtccgtgtcgagcggagattactattggacttggattagacagtcgcccggaaaaggtctggagtggatcggacacatctactactcggggaatacgaattacaacccgtcgttgaaatcacggctcacgattagcatcgatacctccaagacgcagttctcgctcaaacttagctccgtaactgcggccgacaccgcaatctactattgtgtacgcgaccgcgtcacaggggcttttgacatttggggtcagggcactatggtgacctcgtcagcgtcgacaggtggtgggggatcaggaggaggtggctccgggggaggcggaagcggcggtgggggctccgacatccagatgacgcagtcgccctcatcattgtcagcatcagtcggggacagggtcactattacttgtcaggccagccaagatatctcgaactatctgaactggtatcagcagaagcctggaaaagcgcctaagctccttatctatgatgcgtccaatcttgagacaggggtgccgtcgcggttttccggttcagggtcgggaacggacttcacgtttacaatctccagcctgcagccggaggacgaagccacctacttctgccaacacttcgaccatttgcctcttgcgttcggaggtgggacaaaggtggagatcaagcgaacttgataa

SEQ ID NO: 380 - protein, 981 aa, Artificial Sequence
  source: /note="Description of Artificial Sequence: Synthetic polypeptide"
EVQLVESGGGLVQPGGSLRLSCAASGYTFTSYWLHWVRQAPGKGLEWVGMIDPSNSDTRFNPNFKDRFTISADTSKNTAYLQMNSLRAEDTAVYYCATYRSYVTPLDYWGQGTLVTVSSASTKGPSVFPLAPSSKSTSGGTAALGCLVKDYFPEPVTVSWNSGALTSGVHTFPAVLQSSGLYSLSSVVTVPSSSLGTQTYICNVNHKPSNTKVDKKVEPKSCDKTHTCPPCPAPELLGGPSVFLFPPKPKDTLMISRTPEVTCVVVDVSHEDPEVKFNWYVDGVEVHNAKTKPREEQYQSTYRVVSVLTVLHQDWLNGKEYKCKVSNKALPAPIEKTISKAKGQPREPQVYTLPPSREEMTKNQVSLSCAVKGFYPSDIAVEWESNGQPENNYKTTPPVLDSDGSFFLVSKLTVDKSRWQQGNVFSCSVMHEALHNHYTQKSLSLSKSCDKTGGGGSGGGGSGGGGSGGGGSGGGGSGGGGSGGGGSGGGGSCPPCPAPELLGGPSVFLFPPKPKDTLMISRTPEVTCVVVDVSHEDPEVKFNWYVDGVEVHNAKTKPREEQYQSTYRVVSVLTVLHQDWLNGKEYKCKVSNKALPAPIEKTISKAKGQPREPQVYTLPPSREEMTKNQVSLWCLVKGFYPSDIAVEWESNGQPENNYKTTPPVLDSDGSFFLYSKLTVDKSRWQQGNVFSCSVMHEALHNHYTQKSLSLSGECGGGGSGGGGSEVQLVQSGAEVKKPGSSVKVSCKASGGTFSSYAIGWVRQAPGQGLEWMGGIIPIFGIANYAQKFQGRVTITADESTSSAYMELSSLRSEDTAVYYCAREEGPYCSSTSCYAAFDIWGQGTLVTVSSASTGGGGSGGGGSGGGGSGGGGSQSVLTQDPAVSVALGQTVKITCQGDSLRSYFASWYQQKPGQAPTLVMYARNDRPAGVPDRFSGSKSGTSASLAISGLQPEDEADYYCAAWDDSLNGYLFGAGTKLTVL

SEQ ID NO: 381 - DNA, 2949 bp, Artificial Sequence
  source: /note="Description of Artificial Sequence: Synthetic polynucleotide"
gaggtgcagttggtagaatcaggagggggtctggtccaacccggaggaagcctcagactcagctgtgcggcttcgggttacacctttacctcctattggttgcactgggtgagacaggcacctggcaaagggctcgaatgggtcggaatgatcgacccctccaactcagatacgcggtttaacccgaatttcaaggatcgattcacgatctcagcagacacatcgaaaaacacagcgtacctccagatgaattcgttgagggccgaggacacggcggtgtattactgcgccacgtatcgcagctatgtaactccattggattactgggggcagggtactcttgtgacagtctcctcggctagcactaaggggcccagcgtctttccattggcgccctcgtcgaaatcaaccagcggaggaacagctgcgcttggttgcctcgtcaaagactacttccccgagccggtaacggtgtcgtggaactccggtgcgctgacatcaggggtgcacacgttccctgctgtccttcagtcaagcgggttgtactcgctctcgtccgtggtgacggtgccctccagctcgttgggcacgcagacttacatctgcaatgtgaaccataaacccagcaacactaaagtcgacaaaaaggtcgaaccaaaatcgtgcgataagacgcacacctgcccaccttgtccggctccggaactcttgggtggtccgtccgtattcttgttcccgcctaagccgaaggacactcttatgatttcgaggaccccggaggtcacgtgcgtcgtggtggatgtctcgcatgaggacccggaagtcaaattcaactggtacgtagacggtgtcgaggtgcataacgcaaagaccaagcccagggaagagcagtaccagtccacgtaccgggtagtgtcggtgctcaccgtgcttcaccaggactggcttaacgggaaggaatacaagtgtaaagtctccaacaaagcgctccctgcccccatcgaaaagaccatttcgaaagcgaaagggcagccacgcgagcctcaagtgtacaccctgccgccgtcccgggaagagatgactaagaatcaggtatccctctcatgcgctgtcaagggtttctacccgtcagacatcgcagtggaatgggaatcaaacggccagccggagaataactacaagacgacgccgcctgtcctcgattccgacgggtcgttcttcctggtgtcgaagttgacagtggacaagtcgcgatggcagcaaggaaacgtcttctcatgctcggtaatgcacgaggcgctccataaccactatacacagaaatcgctctccttgtcaaagtcgtgcgataagacgggagggggtggatcaggtgggggaggctcgggagggggaggaagcggtggaggagggtcaggaggaggaggcagcgggggcggtggttccggtggtgggggatcaggcggaggcggctcatgcccgccttgtcccgcaccagaactgcttggagggccttcggtctttctctttcccccgaaacccaaagacaccctgatgatctcacgcactcccgaagtcacatgtgtagtcgtcgatgtgtcgcatgaagatccggaggtgaagttcaattggtacgtagatggggtcgaagtgcataatgcaaagacgaaaccgcgagaggagcagtatcagtcaacgtatcgcgtagtaagcgtgttgacggtgctccatcaggattggttgaatggtaaagagtacaagtgcaaggtgtcaaacaaagcgttgccggcccctattgaaaagaccatctcaaaagccaaggggcaaccccgagagccccaagtatacactctcccgccttcgagagaggagatgactaaaaaccaggtgtcgctttggtgtttggtgaaggggttctatccctcggatatcgccgtcgagtgggaatccaatgggcaacccgaaaacaactataagacaacgcctccagtactggactccgacggctcctttttcttgtactccaaattgacggtggataagtcgcggtggcagcaggggaatgtgttttcgtgtagcgtgatgcatgaagccctgcataaccactatactcaaaagtcactttccctgtcgggtgaatgcggcggaggtgggtccgggggtgggggttcggaggtacagctcgtccagagcggcgcagaggtcaagaaaccgggatcaagcgtcaaagtgtcatgtaaagcatcgggtgggaccttttcatcctatgcgattggttgggtccgacaagcgcctggacaggggcttgaatggatgggtggtatcatcccgattttcggaatcgccaactacgcacaaaagtttcaggggagagtgacaattacagccgatgagtcaacgtcctcagcctatatggaactctcatccctgcgcagcgaggacactgcggtctattactgtgcgcgggaagaggggccctactgctcgtcgacctcgtgctacgcggcgtttgatatctggggccagggcaccctcgtgacggtatcgtccgcgtcaacagggggtgggggttcgggcggaggaggatcgggaggaggtggatcgggtggtgggggatcacagtcagtcctgacgcaagacccagcggtatcggtggcccttggacagacagtaaagatcacgtgtcaaggggattcgttgaggtcctacttcgccagctggtatcagcagaagcccggacaggcgcccactcttgtgatgtacgcacgcaacgaccggcctgctggagtgcccgacagattctcggggtcgaaaagcggaacttcagcgtcgttggcaatttccggccttcagccggaggacgaggcggattactactgcgctgcctgggatgactcattgaatgggtatctcttcggtgcggggacgaagttgacggtgctgtgataa

SEQ ID NO: 382 - protein, 973 aa, Artificial Sequence
  source: /note="Description of Artificial Sequence: Synthetic polypeptide"
EVQLVESGGGLVQPGGSLRLSCAASGYTFTSYWLHWVRQAPGKGLEWVGMIDPSNSDTRFNPNFKDRFTISADTSKNTAYLQMNSLRAEDTAVYYCATYRSYVTPLDYWGQGTLVTVSSASTKGPSVFPLAPSSKSTSGGTAALGCLVKDYFPEPVTVSWNSGALTSGVHTFPAVLQSSGLYSLSSVVTVPSSSLGTQTYICNVNHKPSNTKVDKKVEPKSCDKTHTCPSCPAPEFLGGPSVFLFPPKPKDTLMISRTPEVTCVVVDVSQEDPEVQFNWYVDGVEVHNAKTKPREEQFNSKYRVVSVLTVLHQDWLNGKEYKCKVSNKGLPSSIEKTISKAKGQPREPQVYTLPPSREEMTKNQVSLSCAVKGFYPSDIAVEWESNGQPENNYKTTPPVLDSDGSFFLVSKLTVDKSRWQQGNVFSCSVMHEALHNHYTQKSLSLSKSCDKTGGGGSGGGGSGGGGSGGGGSGGGGSGGGGSGGGGSGGGGSCPSCPAPEFLGGPSVFLFPPKPKDTLMISRTPEVTCVVVDVSQEDPEVQFNWYVDGVEVHNAKTKPREEQFNSDYRVVSVLTVLHQDWLNGKEYKCKVSNKGLPSSIEKTISKAKGQPREPQVYTLPPSREEMTKNQVSLWCLVKGFYPSDIAVEWESNGQPENNYKTTPPVLDSDGSFFLYSKLTVDKSRWQQGNVFSCSVMHEALHNHYTQKSLSLSGECGGGGSGGGGSQVQLVESGGGVVQPGESLRISCAVSGFSLTNYGVHWVRQAPGKGLEWLGVIWSGGNTDYNTPFTSRLTISKDNSKSTVYFQMNSLRAEDTAVYYCARALTYYDYEFAYWGQGTLVTVSSASTGGGGSGGGGSGGGGSGGGGSDIVLTQSPSSLSVTPGEKVTFTCRASQSIGTNIHWYQQKPGQSPKLLIKYASESISGVPSRFSGSGSGTDFTLTINSVEAEDAATYYCQQNNNWPTTFGQGTKLEIK

SEQ ID NO: 383 - DNA, 2925 bp, Artificial Sequence
  source: /note="Description of Artificial Sequence: Synthetic polynucleotide"
gaggtgcagttggtagaatcaggagggggtctggtccaacccggaggaagcctcagactcagctgtgcggcttcgggttacacctttacctcctattggttgcactgggtgagacaggcacctggcaaagggctcgaatgggtcggaatgatcgacccctccaactcagatacgcggtttaacccgaatttcaaggatcgattcacgatctcagcagacacatcgaaaaacacagcgtacctccagatgaattcgttgagggccgaggacacggcggtgtattactgcgccacgtatcgcagctatgtaactccattggattactgggggcagggtactcttgtgacagtctcctcggctagcactaagggaccttccgtgttcccactggccccctcaagcaaatctaccagtgggggaacagcagccctgggctgtctggtgaaggattactttccagagcccgtgaccgtcagttggaactcaggggctctgactagcggagtgcacaccttccccgcagtcctgcagtcctctgggctgtactccctgagttcagtggtcactgtgcccagctcctctctgggaacacagacttatatctgcaacgtgaatcacaagccttccaataccaaagtcgacaagaaagtcgagcctaagtcatgtgataaaacccatacatgcccaagctgtcctgcaccagaatttctgggaggaccaagcgtgttcctgtttccacctaagcctaaagacaccctgatgattagtcgcactccagaggtgacctgtgtggtcgtggacgtcagccaggaggatcccgaagtgcagtttaactggtacgtcgatggcgtggaagtccacaatgctaagacaaaaccaagagaggaacagttcaacagcaagtacagggtcgtgtccgtgctgactgtcctgcatcaggactggctgaacggaaaagagtataagtgcaaagtgagcaataagggcctgcccagttcaatcgagaaaacaatttccaaggcaaaaggccagcctcgggaaccacaggtgtataccctgccacccagcagagaggaaatgacaaagaaccaggtgtcactgagctgtgccgtcaaaggcttttaccctagcgatatcgctgtggagtgggaatccaatgggcagccagaaaacaattataagaccacacctccagtgctggacagcgatggatccttctttctggtgtccaagctgaccgtggacaaatctcggtggcagcagggcaacgtgttctcctgctctgtcatgcatgaggccctgcacaatcattacacccagaaaagtctgtcactgagcaagtcctgtgataaaacaggaggcgggggatctggcgggggaggcagtgggggaggcgggtccggaggaggaggaagcggaggaggaggatccggaggaggcgggtctggaggcgggggaagtggaggaggaggatcttgcccaagttgtccagcacctgagttcctgggaggaccatccgtgttcctgtttccccctaagcccaaagacaccctgatgatcagccggacacctgaagtgacttgcgtcgtggtggacgtgtcccaggaggatccagaggtccagtttaactggtatgtcgatggcgtggaggtccacaatgctaagaccaaacctcgcgaggaacagttcaactctgactaccgagtggtcagtgtgctgacagtcctgcatcaggattggctgaacgggaaggaatacaaatgtaaagtgagcaataagggactgccaagctccatcgagaagaccatcagcaaagccaaaggccagcccagggaacctcaggtgtacactctgccaccctcccgcgaggaaatgaccaagaaccaggtgtctctgtggtgtctggtcaaaggattttatccctctgacatcgccgtggagtgggaaagtaatggccagcctgaaaacaattacaagactacccctccagtgctggactcagatgggagcttctttctgtatagtaagctgaccgtggataaatcacggtggcagcagggaaatgtgttctcttgcagtgtcatgcacgaggccctgcataaccattacacacagaagtcattaagcttatccggagagtgtggcggcggaggaagcggaggaggcgggtctcaggtgcagctggtggagtctggaggaggagtggtgcagccaggagaatccctgaggatttcttgtgccgtgtcaggcttcagcctgactaattacggggtgcactgggtgcgccaggctccaggcaaagggctggagtggctgggcgtgatctggtccggagggaatacagactacaacacccctttcacaagtaggctgaccatttcaaaggataactcaaaaagcacagtgtatttccagatgaacagcctgcgggccgaggacacagccgtgtactattgcgccagagctctgacttactatgattacgaattcgcctattggggacagggcactctggtgaccgtgagcagcgccagcaccggaggaggaggaagcggcggaggaggctccggaggaggcgggtctggaggcgggggaagtgacatcgtgctgactcagtcaccatctagtctgagcgtgacccccggcgagaaagtgacttttacctgccgggcctcccagtctatcggaaccaatattcattggtatcagcagaaacccggccagtcccctaagctgctgatcaaatatgctagtgaatcaattagcggcgtgcccagccggttcagcgggtctggaagtggcaccgactttacactgactatcaacagtgtggaggccgaagatgccgctacatactattgtcagcagaacaataactggcctaccacatttgggcagggaacaaagctggagatcaagtgataa

SEQ ID NO: 384 - protein, 974 aa, Artificial Sequence
  source: /note="Description of Artificial Sequence: Synthetic polypeptide"
EVQLVESGGGLVQPGGSLRLSCAASGYTFTSYWLHWVRQAPGKGLEWVGMIDPSNSDTRFNPNFKDRFTISADTSKNTAYLQMNSLRAEDTAVYYCATYRSYVTPLDYWGQGTLVTVSSASTKGPSVFPLAPSSKSTSGGTAALGCLVKDYFPEPVTVSWNSGALTSGVHTFPAVLQSSGLYSLSSVVTVPSSSLGTQTYICNVNHKPSNTKVDKKVEPKSCDKTHTCPSCPAPEFLGGPSVFLFPPKPKDTLMISRTPEVTCVVVDVSQEDPEVQFNWYVDGVEVHNAKTKPREEQFNSKYRVVSVLTVLHQDWLNGKEYKCKVSNKGLPSSIEKTISKAKGQPREPQVYTLPPSREEMTKNQVSLSCAVKGFYPSDIAVEWESNGQPENNYKTTPPVLDSDGSFFLVSKLTVDKSRWQQGNVFSCSVMHEALHNHYTQKSLSLSKSCDKTGGGGSGGGGSGGGGSGGGGSGGGGSGGGGSGGGGSGGGGSCPSCPAPEFLGGPSVFLFPPKPKDTLMISRTPEVTCVVVDVSQEDPEVQFNWYVDGVEVHNAKTKPREEQFNSDYRVVSVLTVLHQDWLNGKEYKCKVSNKGLPSSIEKTISKAKGQPREPQVYTLPPSREEMTKNQVSLWCLVKGFYPSDIAVEWESNGQPENNYKTTPPVLDSDGSFFLYSKLTVDKSRWQQGNVFSCSVMHEALHNHYTQKSLSLSGECGGGGSGGGGSQVQLQESGPGLVKPSETLSLTCTVSGGSVSSGDYYWTWIRQSPGKGLEWIGHIYYSGNTNYNPSLKSRLTISIDTSKTQFSLKLSSVTAADTAIYYCVRDRVTGAFDIWGQGTMVTSSASTGGGGSGGGGSGGGGSGGGGSDIQMTQSPSSLSASVGDRVTITCQASQDISNYLNWYQQKPGKAPKLLIYDASNLETGVPSRFSGSGSGTDFTFTISSLQPEDEATYFCQHFDHLPLAFGGGTKVEIKRT

SEQ ID NO: 385 - DNA, 2928 bp, Artificial Sequence
  source: /note="Description of Artificial Sequence: Synthetic polynucleotide"
gaggtgcagttggtagaatcaggagggggtctggtccaacccggaggaagcctcagactcagctgtgcggcttcgggttacacctttacctcctattggttgcactgggtgagacaggcacctggcaaagggctcgaatgggtcggaatgatcgacccctccaactcagatacgcggtttaacccgaatttcaaggatcgattcacgatctcagcagacacatcgaaaaacacagcgtacctccagatgaattcgttgagggccgaggacacggcggtgtattactgcgccacgtatcgcagctatgtaactccattggattactgggggcagggtactcttgtgacagtctcctcggctagcactaagggaccttccgtgttcccactggccccctcaagcaaatctaccagtgggggaacagcagccctgggctgtctggtgaaggattactttccagagcccgtgaccgtcagttggaactcaggggctctgactagcggagtgcacaccttccccgcagtcctgcagtcctctgggctgtactccctgagttcagtggtcactgtgcccagctcctctctgggaacacagacttatatctgcaacgtgaatcacaagccttccaataccaaagtcgacaagaaagtcgagcctaagtcatgtgataaaacccatacatgcccaagctgtcctgcaccagaatttctgggaggaccaagcgtgttcctgtttccacctaagcctaaagacaccctgatgattagtcgcactccagaggtgacctgtgtggtcgtggacgtcagccaggaggatcccgaagtgcagtttaactggtacgtcgatggcgtggaagtccacaatgctaagacaaaaccaagagaggaacagttcaacagcaagtacagggtcgtgtccgtgctgactgtcctgcatcaggactggctgaacggaaaagagtataagtgcaaagtgagcaataagggcctgcccagttcaatcgagaaaacaatttccaaggcaaaaggccagcctcgggaaccacaggtgtataccctgccacccagcagagaggaaatgacaaagaaccaggtgtcactgagctgtgccgtcaaaggcttttaccctagcgatatcgctgtggagtgggaatccaatgggcagccagaaaacaattataagaccacacctccagtgctggacagcgatggatccttctttctggtgtccaagctgaccgtggacaaatctcggtggcagcagggcaacgtgttctcctgctctgtcatgcatgaggccctgcacaatcattacacccagaaaagtctgtcactgagcaagtcctgtgataaaacaggaggcgggggatctggcgggggaggcagtgggggaggcgggtccggaggaggaggaagcggaggaggaggatccggaggaggcgggtctggaggcgggggaagtggaggaggaggatcttgcccaagttgtccagcacctgagttcctgggaggaccatccgtgttcctgtttccccctaagcccaaagacaccctgatgatcagccggacacctgaagtgacttgcgtcgtggtggacgtgtcccaggaggatccagaggtccagtttaactggtatgtcgatggcgtggaggtccacaatgctaagaccaaacctcgcgaggaacagttcaactctgactaccgagtggtcagtgtgctgacagtcctgcatcaggattggctgaacgggaaggaatacaaatgtaaagtgagcaataagggactgccaagctccatcgagaagaccatcagcaaagccaaaggccagcccagggaacctcaggtgtacactctgccaccctcccgcgaggaaatgaccaagaaccaggtgtctctgtggtgtctggtcaaaggattttatccctctgacatcgccgtggagtgggaaagtaatggccagcctgaaaacaattacaagactacccctccagtgctggactcagatgggagcttctttctgtatagtaagctgaccgtggataaatcacggtggcagcagggaaatgtgttctcttgcagtgtcatgcacgaggccctgcataaccattacacacagaagtcattaagcttatccggagagtgtggcggcggaggaagcggaggaggcgggtctcaagtccagttgcaagaaagcgggccaggactcgtgaaaccctcggaaaccctgtcactgacgtgcacggtgagcggagggtccgtgtcgagcggagattactattggacttggattagacagtcgcccggaaaaggtctggagtggatcggacacatctactactcggggaatacgaattacaacccgtcgttgaaatcacggctcacgattagcatcgatacctccaagacgcagttctcgctcaaacttagctccgtaactgcggccgacaccgcaatctactattgtgtacgcgaccgcgtcacaggggcttttgacatttggggtcagggcactatggtgacctcgtcagcgtcgacaggtggtgggggatcaggaggaggtggctccgggggaggcggaagcggcggtgggggctccgacatccagatgacgcagtcgccctcatcattgtcagcatcagtcggggacagggtcactattacttgtcaggccagccaagatatctcgaactatctgaactggtatcagcagaagcctggaaaagcgcctaagctccttatctatgatgcgtccaatcttgagacaggggtgccgtcgcggttttccggttcagggtcgggaacggacttcacgtttacaatctccagcctgcagccggaggacgaagccacctacttctgccaacacttcgaccatttgcctcttgcgttcggaggtgggacaaaggtggagatcaagcgaacttgataa

SEQ ID NO: 386 - protein, 981 aa, Artificial Sequence
  source: /note="Description of Artificial Sequence: Synthetic polypeptide"
EVQLVESGGGLVQPGGSLRLSCAASGYTFTSYWLHWVRQAPGKGLEWVGMIDPSNSDTRFNPNFKDRFTISADTSKNTAYLQMNSLRAEDTAVYYCATYRSYVTPLDYWGQGTLVTVSSASTKGPSVFPLAPSSKSTSGGTAALGCLVKDYFPEPVTVSWNSGALTSGVHTFPAVLQSSGLYSLSSVVTVPSSSLGTQTYICNVNHKPSNTKVDKKVEPKSCDKTHTCPSCPAPEFLGGPSVFLFPPKPKDTLMISRTPEVTCVVVDVSQEDPEVQFNWYVDGVEVHNAKTKPREEQFNSKYRVVSVLTVLHQDWLNGKEYKCKVSNKGLPSSIEKTISKAKGQPREPQVYTLPPSREEMTKNQVSLSCAVKGFYPSDIAVEWESNGQPENNYKTTPPVLDSDGSFFLVSKLTVDKSRWQQGNVFSCSVMHEALHNHYTQKSLSLSKSCDKTGGGGSGGGGSGGGGSGGGGSGGGGSGGGGSGGGGSGGGGSCPSCPAPEFLGGPSVFLFPPKPKDTLMISRTPEVTCVVVDVSQEDPEVQFNWYVDGVEVHNAKTKPREEQFNSDYRVVSVLTVLHQDWLNGKEYKCKVSNKGLPSSIEKTISKAKGQPREPQVYTLPPSREEMTKNQVSLWCLVKGFYPSDIAVEWESNGQPENNYKTTPPVLDSDGSFFLYSKLTVDKSRWQQGNVFSCSVMHEALHNHYTQKSLSLSGECGGGGSGGGGSEVQLVQSGAEVKKPGSSVKVSCKASGGTFSSYAIGWVRQAPGQGLEWMGGIIPIFGIANYAQKFQGRVTITADESTSSAYMELSSLRSEDTAVYYCAREEGPYCSSTSCYAAFDIWGQGTLVTVSSASTGGGGSGGGGSGGGGSGGGGSQSVLTQDPAVSVALGQTVKITCQGDSLRSYFASWYQQKPGQAPTLVMYARNDRPAGVPDRFSGSKSGTSASLAISGLQPEDEADYYCAAWDDSLNGYLFGAGTKLTVL

SEQ ID NO: 387 - DNA, 3030 bp, Artificial Sequence
  source: /note="Description of Artificial Sequence: Synthetic polynucleotide"
ggtaccatgggcttcggactgtcgtggctttttctggtggcgattcttaagggggtccagtgcgaggtgcagttggtagaatcaggagggggtctggtccaacccggaggaagcctcagactcagctgtgcggcttcgggttacacctttacctcctattggttgcactgggtgagacaggcacctggcaaagggctcgaatgggtcggaatgatcgacccctccaactcagatacgcggtttaacccgaatttcaaggatcgattcacgatctcagcagacacatcgaaaaacacagcgtacctccagatgaattcgttgagggccgaggacacggcggtgtattactgcgccacgtatcgcagctatgtaactccattggattactgggggcagggtactcttgtgacagtctcctcggctagcactaagggaccttccgtgttcccactggccccctcaagcaaatctaccagtgggggaacagcagccctgggctgtctggtgaaggattactttccagagcccgtgaccgtcagttggaactcaggggctctgactagcggagtgcacaccttccccgcagtcctgcagtcctctgggctgtactccctgagttcagtggtcactgtgcccagctcctctctgggaacacagacttatatctgcaacgtgaatcacaagccttccaataccaaagtcgacaagaaagtcgagcctaagtcatgtgataaaacccatacatgcccaagctgtcctgcaccagaatttctgggaggaccaagcgtgttcctgtttccacctaagcctaaagacaccctgatgattagtcgcactccagaggtgacctgtgtggtcgtggacgtcagccaggaggatcccgaagtgcagtttaactggtacgtcgatggcgtggaagtccacaatgctaagacaaaaccaagagaggaacagttcaacagcaagtacagggtcgtgtccgtgctgactgtcctgcatcaggactggctgaacggaaaagagtataagtgcaaagtgagcaataagggcctgcccagttcaatcgagaaaacaatttccaaggcaaaaggccagcctcgggaaccacaggtgtataccctgccacccagcagagaggaaatgacaaagaaccaggtgtcactgagctgtgccgtcaaaggcttttaccctagcgatatcgctgtggagtgggaatccaatgggcagccagaaaacaattataagaccacacctccagtgctggacagcgatggatccttctttctggtgtccaagctgaccgtggacaaatctcggtggcagcagggcaacgtgttctcctgctctgtcatgcatgaggccctgcacaatcattacacccagaaaagtctgtcactgagcaagtcctgtgataaaacaggaggcgggggatctggcgggggaggcagtgggggaggcgggtccggaggaggaggaagcggaggaggaggatccggaggaggcgggtctggaggcgggggaagtggaggaggaggatcttgcccaagttgtccagcacctgagttcctgggaggaccatccgtgttcctgtttccccctaagcccaaagacaccctgatgatcagccggacacctgaagtgacttgcgtcgtggtggacgtgtcccaggaggatccagaggtccagtttaactggtatgtcgatggcgtggaggtccacaatgctaagaccaaacctcgcgaggaacagttcaactctgactaccgagtggtcagtgtgctgacagtcctgcatcaggattggctgaacgggaaggaatacaaatgtaaagtgagcaataagggactgccaagctccatcgagaagaccatcagcaaagccaaaggccagcccagggaacctcaggtgtacactctgccaccctcccgcgaggaaatgaccaagaaccaggtgtctctgtggtgtctggtcaaaggattttatccctctgacatcgccgtggagtgggaaagtaatggccagcctgaaaacaattacaagactacccctccagtgctggactcagatgggagcttctttctgtatagtaagctgaccgtggataaatcacggtggcagcagggaaatgtgttctcttgcagtgtcatgcacgaggccctgcataaccattacacacagaagtcattaagcttatccggagagtgtggcggcggaggaagcggaggaggcgggtctgaggtacagctcgtccagagcggcgcagaggtcaagaaaccgggatcaagcgtcaaagtgtcatgtaaagcatcgggtgggaccttttcatcctatgcgattggttgggtccgacaagcgcctggacaggggcttgaatggatgggtggtatcatcccgattttcggaatcgccaactacgcacaaaagtttcaggggagagtgacaattacagccgatgagtcaacgtcctcagcctatatggaactctcatccctgcgcagcgaggacactgcggtctattactgtgcgcgggaagaggggccctactgctcgtcgacctcgtgctacgcggcgtttgatatctggggccagggcaccctcgtgacggtatcgtccgcgtcaacagggggtgggggttcgggcggaggaggatcgggaggaggtggatcgggtggtgggggatcacagtcagtcctgacgcaagacccagcggtatcggtggcccttggacagacagtaaagatcacgtgtcaaggggattcgttgaggtcctacttcgccagctggtatcagcagaagcccggacaggcgcccactcttgtgatgtacgcacgcaacgaccggcctgctggagtgcccgacagattctcggggtcgaaaagcggaacttcagcgtcgttggcaatttccggccttcagccggaggacgaggcggattactactgcgctgcctgggatgactcattgaatgggtatctcttcggtgcggggacgaagttgacggtgctgtgataatgataatctagactcgag

SEQ ID NO: 388 - protein, 492 aa, Artificial Sequence
  source: /note="Description of Artificial Sequence: Synthetic polypeptide"
DKTHTCPSCPAPEFLGGPSVFLFPPKPKDTLMISRTPEVTCVVVDVSQEDPEVQFNWYVDGVEVHNAKTKPREEQFDSSYRVVSVLTVLHQDWLNGKEYKCKVSNKGLPSSIEKTISKAKGQPREPQVYTLPPSREEMTKNQVSLSCAVKGFYPSDIAVEWESNGQPENNYKTTPPVLDSDGSFFLVSKLTVDKSRWQQGNVFSCSVMHEALHNHYTQKSLSLSKSCDKTGGGGSGGGGSGGGGSGGGGSGGGGSGGGGSGGGGSGGGGSCPSCPAPEFLGGPSVFLFPPKPKDTLMISRTPEVTCVVVDVSQEDPEVQFNWYVDGVEVHNAKTKPREEQFDSSYRVVSVLTVLHQDWLNGKEYKCKVSNKGLPSSIEKTISKAKGQPREPQVYTLPPSREEMTKNQVSLWCLVKGFYPSDIAVEWESNGQPENNYKTTPPVLDSDGSFFLYSKLTVDKSRWQQGNVFSCSVMHEALHNHYTQKSLSLSGEC

SEQ ID NO: 389 - DNA, 1482 bp, Artificial Sequence
  source: /note="Description of Artificial Sequence: Synthetic polynucleotide"
gataaaacgcacacgtgcccctcgtgtccggcaccggagtttcttggaggtccctcggtgttcctgttccctcccaagccgaaggacacgttgatgatttcgaggacgccggaggtgacgtgtgtggtcgtagacgtgagccaggaggacccggaagtgcagtttaactggtacgtcgatggagtagaagtacataatgccaagacgaagcccagggaggaacaattcgattcgagctatcgcgtcgtatccgtgctgactgtgctccaccaggactggcttaacggaaaagaatacaagtgcaaggtatcaaataagggactcccctcgtcgatcgagaaaacaatcagcaaagcgaaaggacagccgagggaaccgcaagtgtacacattgccgccgtcgcgagaagaaatgaccaagaaccaggtatcactctcgtgcgccgtgaagggcttttacccatcggacattgctgtggagtgggagagcaacggtcaacccgagaataactacaaaactacaccgcccgtgctggattccgacggctcattctttctcgtgtcaaaactgactgtggataagtcgcgctggcaacaggggaatgtgttctcgtgcagcgtcatgcatgaagctcttcataatcactacacccaaaaatccctgtcactctcgaaaagctgtgataagaccgggggtgggggctccggaggaggcggttcgggtggcggtgggtcgggtggaggcggatcgggcggtgggggaagcggtggtggtggaagcggagggggtggatcaggtggagggggcagctgtccatcctgccctgcaccagagtttttgggaggaccgtccgtatttctgtttccgcccaagcccaaagatactttgatgatcagcaggacgcctgaggtaacatgtgtagtggtcgatgtctcgcaagaggaccctgaggtccagttcaattggtacgtggacggggtggaagtccacaacgcgaaaacgaaaccacgcgaagaacagttcgacagcagttacagagtcgtgtcagtcttgacagtccttcaccaggattggttgaatggaaaggagtacaagtgtaaggtgtcaaacaaaggactgcccagctcgatcgaaaagacaatttcgaaggcaaaaggtcaaccgcgggagccacaagtgtatacgctgccgccctcgcgggaggagatgacaaagaatcaggtgtcgctgtggtgtctggtaaaaggattctatccatccgatatcgcggtagagtgggaatcaaacggccagccggagaacaattacaagaccacgccccctgtattggattcggacggatcgttcttcttgtattcgaaactcacggtggacaagtcgcggtggcagcagggtaatgtgttttcatgctcagtcatgcacgaggcgctccataaccattatactcagaagtcgctgtccttgtccggggagtgctgataa

SEQ ID NO: 390 - protein, 492 aa, Artificial Sequence
  source: /note="Description of Artificial Sequence: Synthetic polypeptide"
DKTHTCPSCPAPEFLGGPSVFLFPPKPKDTLMISRTPEVTCVVVDVSQEDPEVQFNWYVDGVEVHNAKTKPREEQFNSKYRVVSVLTVLHQDWLNGKEYKCKVSNKGLPSSIEKTISKAKGQPREPQVYTLPPSREEMTKNQVSLSCAVKGFYPSDIAVEWESNGQPENNYKTTPPVLDSDGSFFLVSKLTVDKSRWQQGNVFSCSVMHEALHNHYTQKSLSLSKSCDKTGGGGSGGGGSGGGGSGGGGSGGGGSGGGGSGGGGSGGGGSCPSCPAPEFLGGPSVFLFPPKPKDTLMISRTPEVTCVVVDVSQEDPEVQFNWYVDGVEVHNAKTKPREEQFDSSYRVVSVLTVLHQDWLNGKEYKCKVSNKGLPSSIEKTISKAKGQPREPQVYTLPPSREEMTKNQVSLWCLVKGFYPSDIAVEWESNGQPENNYKTTPPVLDSDGSFFLYSKLTVDKSRWQQGNVFSCSVMHEALHNHYTQKSLSLSGEC

SEQ ID NO: 391 - DNA, 1482 bp, Artificial Sequence
  source: /note="Description of Artificial Sequence: Synthetic polynucleotide"
gataaaacgcacacgtgcccctcgtgtccggcaccggagtttcttggaggtccctcggtgttcctgttccctcccaagccgaaggacacgttgatgatttcgaggacgccggaggtgacgtgtgtggtcgtagacgtgagccaggaggacccggaagtgcagtttaactggtacgtcgatggagtagaagtacataatgccaagacgaagcccagggaggaacaattcaattcgaagtatcgcgtcgtatccgtgctgactgtgctccaccaggactggcttaacggaaaagaatacaagtgcaaggtatcaaataagggactcccctcgtcgatcgagaaaacaatcagcaaagcgaaaggacagccgagggaaccgcaagtgtacacattgccgccgtcgcgagaagaaatgaccaagaaccaggtatcactctcgtgcgccgtgaagggcttttacccatcggacattgctgtggagtgggagagcaacggtcaacccgagaataactacaaaactacaccgcccgtgctggattccgacggctcattctttctcgtgtcaaaactgactgtggataagtcgcgctggcaacaggggaatgtgttctcgtgcagcgtcatgcatgaagctcttcataatcactacacccaaaaatccctgtcactctcgaaaagctgtgataagaccgggggtgggggctccggaggaggcggttcgggtggcggtgggtcgggtggaggcggatcgggcggtgggggaagcggtggtggtggaagcggagggggtggatcaggtggagggggcagctgtccatcctgccctgcaccagagtttttgggaggaccgtccgtatttctgtttccgcccaagcccaaagatactttgatgatcagcaggacgcctgaggtaacatgtgtagtggtcgatgtctcgcaagaggaccctgaggtccagttcaattggtacgtggacggggtggaagtccacaacgcgaaaacgaaaccacgcgaagaacagttcgacagcagttacagagtcgtgtcagtcttgacagtccttcaccaggattggttgaatggaaaggagtacaagtgtaaggtgtcaaacaaaggactgcccagctcgatcgaaaagacaatttcgaaggcaaaaggtcaaccgcgggagccacaagtgtatacgctgccgccctcgcgggaggagatgacaaagaatcaggtgtcgctgtggtgtctggtaaaaggattctatccatccgatatcgcggtagagtgggaatcaaacggccagccggagaacaattacaagaccacgccccctgtattggattcggacggatcgttcttcttgtattcgaaactcacggtggacaagtcgcggtggcagcagggtaatgtgttttcatgctcagtcatgcacgaggcgctccataaccattatactcagaagtcgctgtccttgtccggggagtgctgataa

SEQ ID NO: 392 - protein, 492 aa, Artificial Sequence
  source: /note="Description of Artificial Sequence: Synthetic polypeptide"
DKTHTCPSCPAPEFLGGPSVFLFPPKPKDTLMISRTPEVTCVVVDVSQEDPEVQFNWYVDGVEVHNAKTKPREEQFDSSYRVVSVLTVLHQDWLNGKEYKCKVSNKGLPSSIEKTISKAKGQPREPQVYTLPPSREEMTKNQVSLSCAVKGFYPSDIAVEWESNGQPENNYKTTPPVLDSDGSFFLVSKLTVDKSRWQQGNVFSCSVMHEALHNHYTQKSLSLSKSCDKTGGGGSGGGGSGGGGSGGGGSGGGGSGGGGSGGGGSGGGGSCPSCPAPEFLGGPSVFLFPPKPKDTLMISRTPEVTCVVVDVSQEDPEVQFNWYVDGVEVHNAKTKPREEQFNSKYRVVSVLTVLHQDWLNGKEYKCKVSNKGLPSSIEKTISKAKGQPREPQVYTLPPSREEMTKNQVSLWCLVKGFYPSDIAVEWESNGQPENNYKTTPPVLDSDGSFFLYSKLTVDKSRWQQGNVFSCSVMHEALHNHYTQKSLSLSGEC

SEQ ID NO: 393 - DNA, 1482 bp, Artificial Sequence
  source: /note="Description of Artificial Sequence: Synthetic polynucleotide"
gataaaacgcacacgtgcccctcgtgtccggcaccggagtttcttggaggtccctcggtgttcctgttccctcccaagccgaaggacacgttgatgatttcgaggacgccggaggtgacgtgtgtggtcgtagacgtgagccaggaggacccggaagtgcagtttaactggtacgtcgatggagtagaagtacataatgccaagacgaagcccagggaggaacaattcgattcgagttatcgcgtcgtatccgtgctgactgtgctccaccaggactggcttaacggaaaagaatacaagtgcaaggtatcaaataagggactcccctcgtcgatcgagaaaacaatcagcaaagcgaaaggacagccgagggaaccgcaagtgtacacattgccgccgtcgcgagaagaaatgaccaagaaccaggtatcactctcgtgcgccgtgaagggcttttacccatcggacattgctgtggagtgggagagcaacggtcaacccgagaataactacaaaactacaccgcccgtgctggattccgacggctcattctttctcgtgtcaaaactgactgtggataagtcgcgctggcaacaggggaatgtgttctcgtgcagcgtcatgcatgaagctcttcataatcactacacccaaaaatccctgtcactctcgaaaagctgtgataagaccgggggtgggggctccggaggaggcggttcgggtggcggtgggtcgggtggaggcggatcgggcggtgggggaagcggtggtggtggaagcggagggggtggatcaggtggagggggcagctgtccatcctgccctgcaccagagtttttgggaggaccgtccgtatttctgtttccgcccaagcccaaagatactttgatgatcagcaggacgcctgaggtaacatgtgtagtggtcgatgtctcgcaagaggaccctgaggtccagttcaattggtacgtggacggggtggaagtccacaacgcgaaaacgaaaccacgcgaagaacagttcaacagcaaatacagagtcgtgtcagtcttgacagtccttcaccaggattggttgaatggaaaggagtacaagtgtaaggtgtcaaacaaaggactgcccagctcgatcgaaaagacaatttcgaaggcaaaaggtcaaccgcgggagccacaagtgtatacgctgccgccctcgcgggaggagatgacaaagaatcaggtgtcgctgtggtgtctggtaaaaggattctatccatccgatatcgcggtagagtgggaatcaaacggccagccggagaacaattacaagaccacgccccctgtattggattcggacggatcgttcttcttgtattcgaaactcacggtggacaagtcgcggtggcagcagggtaatgtgttttcatgctcagtcatgcacgaggcgctccataaccattatactcagaagtcgctgtccttgtccggggagtgctgataa

SEQ ID NO: 394 - protein, 492 aa, Artificial Sequence
  source: /note="Description of Artificial Sequence: Synthetic polypeptide"
DKTHTCPSCPAPEFLGGPSVFLFPPKPKDTLMISRTPEVTCVVVDVSQEDPEVQFNWYVDGVEVHNAKTKPREEQFNSKYRVVSVLTVLHQDWLNGKEYKCKVSNKGLPSSIEKTISKAKGQPREPQVYTLPPSREEMTKNQVSLSCAVKGFYPSDIAVEWESNGQPENNYKTTPPVLDSDGSFFLVSKLTVDKSRWQQGNVFSCSVMHEALHNHYTQKSLSLSKSCDKTGGGGSGGGGSGGGGSGGGGSGGGGSGGGGSGGGGSGGGGSCPSCPAPEFLGGPSVFLFPPKPKDTLMISRTPEVTCVVVDVSQEDPEVQFNWYVDGVEVHNAKTKPREEQFNSDYRVVSVLTVLHQDWLNGKEYKCKVSNKGLPSSIEKTISKAKGQPREPQVYTLPPSREEMTKNQVSLWCLVKGFYPSDIAVEWESNGQPENNYKTTPPVLDSDGSFFLYSKLTVDKSRWQQGNVFSCSVMHEALHNHYTQKSLSLSGEC

SEQ ID NO: 395 - DNA, 1482 bp, Artificial Sequence
  source: /note="Description of Artificial Sequence: Synthetic polynucleotide"
gataaaacgcacacgtgcccctcgtgtccggcaccggagtttcttggaggtccctcggtgttcctgttccctcccaagccgaaggacacgttgatgatttcgaggacgccggaggtgacgtgtgtggtcgtagacgtgagccaggaggacccggaagtgcagtttaactggtacgtcgatggagtagaagtacataatgccaagacgaagcccagggaggaacaattcaattcgaagtatcgcgtcgtatccgtgctgactgtgctccaccaggactggcttaacggaaaagaatacaagtgcaaggtatcaaataagggactcccctcgtcgatcgagaaaacaatcagcaaagcgaaaggacagccgagggaaccgcaagtgtacacattgccgccgtcgcgagaagaaatgaccaagaaccaggtatcactctcgtgcgccgtgaagggcttttacccatcggacattgctgtggagtgggagagcaacggtcaacccgagaataactacaaaactacaccgcccgtgctggattccgacggctcattctttctcgtgtcaaaactgactgtggataagtcgcgctggcaacaggggaatgtgttctcgtgcagcgtcatgcatgaagctcttcataatcactacacccaaaaatccctgtcactctcgaaaagctgtgataagaccgggggtgggggctccggaggaggcggttcgggtggcggtgggtcgggtggaggcggatcgggcggtgggggaagcggtggtggtggaagcggagggggtggatcaggtggagggggcagctgtccatcctgccctgcaccagagtttttgggaggaccgtccgtatttctgtttccgcccaagcccaaagatactttgatgatcagcaggacgcctgaggtaacatgtgtagtggtcgatgtctcgcaagaggaccctgaggtccagttcaattggtacgtggacggggtggaagtccacaacgcgaaaacgaaaccacgcgaagaacagttcaacagcgattacagagtcgtgtcagtcttgacagtccttcaccaggattggttgaatggaaaggagtacaagtgtaaggtgtcaaacaaaggactgcccagctcgatcgaaaagacaatttcgaaggcaaaaggtcaaccgcgggagccacaagtgtatacgctgccgccctcgcgggaggagatgacaaagaatcaggtgtcgctgtggtgtctggtaaaaggattctatccatccgatatcgcggtagagtgggaatcaaacggccagccggagaacaattacaagaccacgccccctgtattggattcggacggatcgttcttcttgtattcgaaactcacggtggacaagtcgcggtggcagcagggtaatgtgttttcatgctcagtcatgcacgaggcgctccataaccattatactcagaagtcgctgtccttgtccggggagtgctgataa

SEQ ID NO: 396 - protein, 492 aa, Artificial Sequence
  source: /note="Description of Artificial Sequence: Synthetic polypeptide"
DKTHTCPSCPAPEFLGGPSVFLFPPKPKDTLMISRTPEVTCVVVDVSQEDPEVQFNWYVDGVEVHNAKTKPREEQFNSDYRVVSVLTVLHQDWLNGKEYKCKVSNKGLPSSIEKTISKAKGQPREPQVYTLPPSREEMTKNQVSLSCAVKGFYPSDIAVEWESNGQPENNYKTTPPVLDSDGSFFLVSKLTVDKSRWQQGNVFSCSVMHEALHNHYTQKSLSLSKSCDKTGGGGSGGGGSGGGGSGGGGSGGGGSGGGGSGGGGSGGGGSCPSCPAPEFLGGPSVFLFPPKPKDTLMISRTPEVTCVVVDVSQEDPEVQFNWYVDGVEVHNAKTKPREEQFNSKYRVVSVLTVLHQDWLNGKEYKCKVSNKGLPSSIEKTISKAKGQPREPQVYTLPPSREEMTKNQVSLWCLVKGFYPSDIAVEWESNGQPENNYKTTPPVLDSDGSFFLYSKLTVDKSRWQQGNVFSCSVMHEALHNHYTQKSLSLSGEC

SEQ ID NO: 397 - DNA, 1482 bp, Artificial Sequence
  source: /note="Description of Artificial Sequence: Synthetic polynucleotide"
gataaaacgcacacgtgcccctcgtgtccggcaccggagtttcttggaggtccctcggtgttcctgttccctcccaagccgaaggacacgttgatgatttcgaggacgccggaggtgacgtgtgtggtcgtagacgtgagccaggaggacccggaagtgcagtttaactggtacgtcgatggagtagaagtacataatgccaagacgaagcccagggaggaacaattcaattcggactatcgcgtcgtatccgtgctgactgtgctccaccaggactggcttaacggaaaagaatacaagtgcaaggtatcaaataagggactcccctcgtcgatcgagaaaacaatcagcaaagcgaaaggacagccgagggaaccgcaagtgtacacattgccgccgtcgcgagaagaaatgaccaagaaccaggtatcactctcgtgcgccgtgaagggcttttacccatcggacattgctgtggagtgggagagcaacggtcaacccgagaataactacaaaactacaccgcccgtgctggattccgacggctcattctttctcgtgtcaaaactgactgtggataagtcgcgctggcaacaggggaatgtgttctcgtgcagcgtcatgcatgaagctcttcataatcactacacccaaaaatccctgtcactctcgaaaagctgtgataagaccgggggtgggggctccggaggaggcggttcgggtggcggtgggtcgggtggaggcggatcgggcggtgggggaagcggtggtggtggaagcggagggggtggatcaggtggagggggcagctgtccatcctgccctgcaccagagtttttgggaggaccgtccgtatttctgtttccgcccaagcccaaagatactttgatgatcagcaggacgcctgaggtaacatgtgtagtggtcgatgtctcgcaagaggaccctgaggtccagttcaattggtacgtggacggggtggaagtccacaacgcgaaaacgaaaccacgcgaagaacagttcaacagcaaatacagagtcgtgtcagtcttgacagtccttcaccaggattggttgaatggaaaggagtacaagtgtaaggtgtcaaacaaaggactgcccagctcgatcgaaaagacaatttcgaaggcaaaaggtcaaccgcgggagccacaagtgtatacgctgccgccctcgcgggaggagatgacaaagaatcaggtgtcgctgtggtgtctggtaaaaggattctatccatccgatatcgcggtagagtgggaatcaaacggccagccggagaacaattacaagaccacgccccctgtattggattcggacggatcgttcttcttgtattcgaaactcacggtggacaagtcgcggtggcagcagggtaatgtgttttcatgctcagtcatgcacgaggcgctccataaccattatactcagaagtcgctgtccttgtccggggagtgctgataa

SEQ ID NO: 398 - protein, 492 aa, Artificial Sequence
  source: /note="Description of Artificial Sequence: Synthetic polypeptide"
DKTHTCPSCPAPEFLGGPSVFLFPPKPKDTLMISRTPEVTCVVVDVSQEDPEVQFNWYVDGVEVHNAKTKPREEQFNSDYRVVSVLTVLHQDWLNGKEYKCKVSNKGLPSSIEKTISKAKGQPREPQVYTLPPSREEMTKNQVSLSCAVKGFYPSDIAVEWESNGQPENNYKTTPPVLDSDGSFFLVSKLTVDKSRWQQGNVFSCSVMHEALHNHYTQKSLSLSKSCDKTGGGGSGGGGSGGGGSGGGGSGGGGSGGGGSGGGGSGGGGSCPSCPAPEFLGGPSVFLFPPKPKDTLMISRTPEVTCVVVDVSQEDPEVQFNWYVDGVEVHNAKTKPREEQFNSDYRVVSVLTVLHQDWLNGKEYKCKVSNKGLPSSIEKTISKAKGQPREPQVYTLPPSREEMTKNQVSLWCLVKGFYPSDIAVEWESNGQPENNYKTTPPVLDSDGSFFLYSKLTVDKSRWQQGNVFSCSVMHEALHNHYTQKSLSLSGEC

SEQ ID NO: 399 - DNA, 1482 bp, Artificial Sequence
  source: /note="Description of Artificial Sequence: Synthetic polynucleotide"
gataaaacgcacacgtgcccctcgtgtccggcaccggagtttcttggaggtccctcggtgttcctgttccctcccaagccgaaggacacgttgatgatttcgaggacgccggaggtgacgtgtgtggtcgtagacgtgagccaggaggacccggaagtgcagtttaactggtacgtcgatggagtagaagtacataatgccaagacgaagcccagggaggaacaattcaattcggattatcgcgtcgtatccgtgctgactgtgctccaccaggactggcttaacggaaaagaatacaagtgcaaggtatcaaataagggactcccctcgtcgatcgagaaaacaatcagcaaagcgaaaggacagccgagggaaccgcaagtgtacacattgccgccgtcgcgagaagaaatgaccaagaaccaggtatcactctcgtgcgccgtgaagggcttttacccatcggacattgctgtggagtgggagagcaacggtcaacccgagaataactacaaaactacaccgcccgtgctggattccgacggctcattctttctcgtgtcaaaactgactgtggataagtcgcgctggcaacaggggaatgtgttctcgtgcagcgtcatgcatgaagctcttcataatcactacacccaaaaatccctgtcactctcgaaaagctgtgataagaccgggggtgggggctccggaggaggcggttcgggtggcggtgggtcgggtggaggcggatcgggcggtgggggaagcggtggtggtggaagcggagggggtggatcaggtggagggggcagctgtccatcctgccctgcaccagagtttttgggaggaccgtccgtatttctgtttccgcccaagcccaaagatactttgatgatcagcaggacgcctgaggtaacatgtgtagtggtcgatgtctcgcaagaggaccctgaggtccagttcaattggtacgtggacggggtggaagtccacaacgcgaaaacgaaaccacgcgaagaacagttcaacagcgattacagagtcgtgtcagtcttgacagtccttcaccaggattggttgaatggaaaggagtacaagtgtaaggtgtcaaacaaaggactgcccagctcgatcgaaaagacaatttcgaaggcaaaaggtcaaccgcgggagccacaagtgtatacgctgccgccctcgcgggaggagatgacaaagaatcaggtgtcgctgtggtgtctggtaaaaggattctatccatccgatatcgcggtagagtgggaatcaaacggccagccggagaacaattacaagaccacgccccctgtattggattcggacggatcgttcttcttgtattcgaaactcacggtggacaagtcgcggtggcagcagggtaatgtgttttcatgctcagtcatgcacgaggcgctccataaccattatactcagaagtcgctgtccttgtccggggagtgctgataa

SEQ ID NO: 400 - protein, 40 aa, Artificial Sequence
  source: /note="Description of Artificial Sequence: Synthetic polypeptide"
  misc_feature (1)..(40): /note="This sequence may encompass 4 to 8 'Gly Gly Gly Gly Ser' repeating units"
  VARIANT (21)..(40): /replace=" "
  misc_feature (21)..(40): /note="Residues given in the sequence have no preference with respect to the annotation for said positions"
GGGGSGGGGSGGGGSGGGGSGGGGSGGGGSGGGGSGGGGS

SEQ ID NO: 401 - protein, 5 aa, Artificial Sequence
  source: /note="Description of Artificial Sequence: Synthetic peptide"
GGGGS

SEQ ID NO: 402 - protein, 100 aa, Artificial Sequence
  source: /note="Description of Artificial Sequence: Synthetic polypeptide"
  misc_feature (1)..(100): /note="This sequence may encompass 1 to 20 'Gly Gly Gly Gly Ser' repeating units"
  VARIANT (6)..(100): /replace=" "
  misc_feature (6)..(100): /note="Residues given in the sequence have no preference with respect to the annotation for said positions"
  misc_feature (1)..(100): /note="see specification as filed for detailed description of substitutions and preferred embodiments"
GGGGSGGGGSGGGGSGGGGSGGGGSGGGGSGGGGSGGGGSGGGGSGGGGSGGGGSGGGGSGGGGSGGGGSGGGGSGGGGSGGGGSGGGGSGGGGSGGGGS

SEQ ID NO: 403 - protein, 10 aa, Artificial Sequence
  source: /note="Description of Artificial Sequence: Synthetic peptide"
GGGGSGGGGS

SEQ ID NO: 404 - protein, 15 aa, Artificial Sequence
  source: /note="Description of Artificial Sequence: Synthetic peptide"
GGGGSGGGGSGGGGS

SEQ ID NO: 405 - protein, 20 aa, Artificial Sequence
  source: /note="Description of Artificial Sequence: Synthetic peptide"
GGGGSGGGGSGGGGSGGGGS

SEQ ID NO: 406 - protein, 25 aa, Artificial Sequence
  source: /note="Description of Artificial Sequence: Synthetic peptide"
GGGGSGGGGSGGGGSGGGGSGGGGS

SEQ ID NO: 407 - protein, 30 aa, Artificial Sequence
  source: /note="Description of Artificial Sequence: Synthetic polypeptide"
GGGGSGGGGSGGGGSGGGGSGGGGSGGGGS

SEQ ID NO: 408 - protein, 35 aa, Artificial Sequence
  source: /note="Description of Artificial Sequence: Synthetic polypeptide"
GGGGSGGGGSGGGGSGGGGSGGGGSGGGGSGGGGS

SEQ ID NO: 409 - protein, 40 aa, Artificial Sequence; identical to SEQ ID NO: 400
  source: /note="Description of Artificial Sequence: Synthetic polypeptide"

SEQ ID NO: 410 - protein, 45 aa, Artificial Sequence
  source: /note="Description of Artificial Sequence: Synthetic polypeptide"
  misc_feature (1)..(45): /note="This sequence may encompass 1 to 15 'Gly Gly Ser' repeating units"
  VARIANT (4)..(45): /replace=" "
  misc_feature (4)..(45): /note="Residues given in the sequence have no preference with respect to the annotation for said positions"
  misc_feature (1)..(45): /note="see specification as filed for detailed description of substitutions and preferred embodiments"
GGSGGSGGSGGSGGSGGSGGSGGSGGSGGSGGSGGSGGSGGSGGS

SEQ ID NO: 411 - protein, 60 aa, Artificial Sequence
  source: /note="Description of Artificial Sequence: Synthetic polypeptide"
  misc_feature (1)..(60): /note="This sequence may encompass 1 to 15 'Gly Ser Gly Ser' repeating units"
  VARIANT (5)..(60): /replace=" "
  misc_feature (5)..(60): /note="Residues given in the sequence have no preference with respect to the annotation for said positions"
  misc_feature (1)..(60): /note="see specification as filed for detailed description of substitutions and preferred embodiments"
GSGSGSGSGSGSGSGSGSGSGSGSGSGSGSGSGSGSGSGSGSGSGSGSGSGSGSGSGSGS

SEQ ID NO: 412 - protein, 50 aa, Artificial Sequence
  source: /note="Description of Artificial Sequence: Synthetic polypeptide"
  misc_feature (1)..(50): /note="This sequence may encompass 1 to 10 'Gly Gly Gly Gly Ser' repeating units"
  VARIANT (6)..(50): /replace=" "
  misc_feature (6)..(50): /note="Residues given in the sequence have no preference with respect to the annotation for said positions"
  misc_feature (1)..(50): /note="see specification as filed for detailed description of substitutions and preferred embodiments"
GGGGSGGGGSGGGGSGGGGSGGGGSGGGGSGGGGSGGGGSGGGGSGGGGS

SEQ ID NO: 413 - protein, 25 aa, Artificial Sequence
  source: /note="Description of Artificial Sequence: Synthetic peptide"
  misc_feature (1)..(25): /note="This sequence may encompass 1 to 5 'Gly Gly Gly Gly Ser' repeating units"
  VARIANT (6)..(25): /replace=" "
  misc_feature (6)..(25): /note="Residues given in the sequence have no preference with respect to the annotation for said positions"
  misc_feature (1)..(100): /note="see specification as filed for detailed description of substitutions and preferred embodiments"
GGGGSGGGGSGGGGSGGGGSGGGGS

1-123. (canceled)

124. An antibody, which is a Tandem Fc Bispecific Antibody (“TFcBA”), wherein the TFcBA comprises a first binding site that is a single anti-c-Met binding site and at least one second binding site that specifically binds to a cell surface receptor other than c-Met; optionally a cell surface receptor selected from ALK, AXL, CEA, CD44, ErbB2, ErbB3, ErbB4, IGF1R, IGF2R, Insulin receptor, RON, EGFR, VEGFR1, VEGFR2, TNFR, FGFR1, FGFR2, FGFR3, FGFR4, PDGFR alpha, PDGFR beta, c-Kit, EPCAM and EphA2, wherein the anti-c-Met binding site and the second binding site are linked through a Tandem Fc (“TFc”), and
a. the TFc comprises a first Fc region and a second Fc region, or
b. the TFc comprises a first Fc region and a second Fc region which first Fc region and the second Fc region comprise a first and a second CH3 domain, or
c. the TFc comprises a first Fc region and a second Fc region which first Fc region and the second Fc region comprise a first and a second CH3 domain and a first and a second CH2 domain,
d. the TFc comprises a first Fc region and a second Fc region, and the first and the second Fc regions comprise a first and a second hinge, respectively, each said first hinge and said second hinge having a C-terminus and an N-terminus, or
e. the TFc comprises a first Fc region and a second Fc region which first Fc region and the second Fc region comprise a first and a second CH3 domain and the first and the second Fc regions comprise a first and a second hinge, respectively, each said first hinge and said second hinge having a C-terminus and an N-terminus, or
f. the TFc comprises a first Fc region and a second Fc region which first Fc region and the second Fc region comprise a first and a second CH3 domain and a first and a second CH2 domain, and the first and the second Fc regions comprise a first and a second hinge, respectively, each said first hinge and said second hinge having a C-terminus and an N-terminus; each said first Fc region and second Fc region and first and a second CH3 domain and first and second CH2 domain having a C-terminus and an N-terminus; the first Fc region and the second Fc region being linked through a TFc linker to form a contiguous polypeptide, wherein the TFc linker:
g. has a C-terminus and an N-terminus, or
h. comprises 20-50 amino acids and has a C-terminus and an N-terminus, or
i. is a Gly-Ser linker and has a C-terminus and an N-terminus, or
j. comprises (Gly4Ser)n, wherein n is 4, 5, 6, 7 or 8 and has a C-terminus and an N-terminus; and
the first and the second Fc regions associate to form an Fc dimer.

125. The TFcBA of claim 124, wherein
a. the TFcBA inhibits signal transduction induced by either or both of HGF and a cognate ligand of the receptor specifically bound by the at least one second binding site with an IC50 of 10 nM or less or 1 nM or less or 100 pM or less, or a maximal percent inhibition of at least 70% or at least 80% or at least 90%, as indicated by inhibition of phosphorylation of either or both of c-Met and the receptor specifically bound by the at least one second binding site; or
b. expression of the TFcBA in a cell produces (i) more correctly formed TFcAB molecules relative to the expression of a multivalent antibody that does not comprise a TFc or (ii) more than 80% of correctly formed TFcAB molecules as determined by Size Exclusion Chromatography (SEC).

126. The TFcBA of claim 124, wherein the second hinge does not comprise an upper hinge subdomain.

127. The TFcBA of claim 124, wherein:
a. the TFc comprised in the TFcBA comprises in amino to carboxyl terminal order: a first CH2 domain, a first CH3 domain, a TFc linker, a second CH2 domain and a second CH3 domain, or
b. the TFc comprised in the TFcBA comprises in amino to carboxyl terminal order: a first hinge, a first CH2 domain, a first CH3 domain, a TFc linker, a second CH2 domain and a second CH3 domain, or
c. the TFc comprised in the TFcBA comprises in amino to carboxyl terminal order: a first hinge, a first CH2 domain, a first CH3 domain, a TFc linker, a second hinge, a second CH2 domain and a second CH3 domain.

128. The TFcBA of claim 127, wherein the first hinge comprises an upper hinge subdomain, a core hinge subdomain and a lower hinge subdomain and the second hinge comprises a core hinge subdomain and a lower hinge subdomain, but not an upper hinge subdomain, each said hinge sub-domain having a C-terminus and an N-terminus.

129. The TFcBA of claim 124, wherein the TFc comprised by the TFcBA comprises in amino to carboxyl terminal order: a first hinge, which is linked at its C-terminus to the N-terminus of a first CH2 domain, which is linked at its C-terminus to the N-terminus of a first CH3 domain, which is linked at its C-terminus to the N-terminus of a TFc linker, which is linked at its C-terminus to the N-terminus of a second hinge, which is linked at its C-terminus to the N-terminus of a second CH2 domain, which is linked at its C-terminus to the N-terminus of a second CH3 domain.

130. The TFcBA of claim 124 wherein the TFc is an IgG1 TFc, a hybrid TFc, or an IgG1/IgG4 TFc.

131. The TFcBA of claim 129, wherein the TFc is an IgG TFc and comprises in amino to carboxyl terminal order: a first IgG1 hinge, a first IgG1 CH2 domain, a first IgG1 CH3 domain, a TFc linker, a second IgG1 hinge, a second IgG1 CH2 domain, and a second IgG1 CH3 domain.

132. The TFcBA of claim 130, wherein the TFc is a hybrid TFc that comprises in amino to carboxyl terminal order: a first IgG1/IgG4 hinge, a first IgG4 CH2 domain, a first IgG1 CH3 domain, a TFc linker, a second IgG4 hinge, a second IgG4 CH2 domain, and a second IgG1 CH3 domain.

133. The TFcBA of claim 124, wherein
a. either or both of the first CH3 domain and the second CH3 domain comprise one or more amino acid (aa) modifications that enhance or stabilize the binding between the first and the second Fc regions, or
b. each of the first CH3 domain and the second CH3 domain comprises an aa modification, which modification is an Association Enhancing Modification (“AEM”) that enhances the association of the first CH3 domain with the second CH3 domain, or
c. each of the first CH3 domain and the second CH3 domain comprises an aa modification, which modification is an AEM that enhances the association of the first CH3 domain with the second CH3 domain and the AEM is comprised by a module selected from the group consisting of AEM module 1, AEM module 2, AEM module 3 and AEM module 4, or
d. either or both of the first Fc region and the second Fc region comprises an aa modification that adds a cysteine as an insertion or replacement, which cysteine forms a disulfide bond with a cysteine in the other Fc region (a “DiS” modification), or
e. either or both of the first Fc region and the second Fc region comprises a DiS modification in a hinge, or
f. either or both of the first and the second Fc region comprise a DiS modification in a CH3 domain, or
g. either or both of the first Fc region and the second Fc region comprises a DiS modification, wherein the DiS modification is comprised by DiS module 1 or DiS module 2, or
h. either or both of the first Fc region and the second Fc region comprises a DiS modification in a hinge, wherein the DiS modification is comprised by DiS module 1 or DiS module 2, or
i. either or both of the first and the second Fc region comprise a DiS modification in a CH3 domain, wherein the DiS modification is comprised by DiS module 1 or DiS module 2.

134. The TFcBA of claim 133, wherein each of the first CH3 domain and the second CH3 domain comprises one or more AEM modifications and one or more DiS modifications, or wherein either or both of the first and the second CH3 domains comprises an aa sequence selected from the group consisting of SEQ ID NOs:27-98, or that is at least 70% identical to an aa sequence selected from the group consisting of SEQ ID NOs:27-98, or which differs therefrom in at most 30 aa additions, deletions or substitutions, or wherein the first CH3 domain or the second CH3 domain comprises an aa sequence selected from the group consisting of SEQ ID NOs:27-98.

135. The TFcBA of claim 124, wherein
a. the first CH3 and second CH3 domains together comprise a pair of two different members, each member being a CH3 amino acid (aa) sequence, each pair selected from the group of pairs consisting of SEQ ID NOs:31 and 35; SEQ ID NOs:33 and 37; SEQ ID NOs:39 and 43; SEQ ID NOs:41 and 45; SEQ ID NOs:47 and 51; SEQ ID NOs:49 and 53; SEQ ID NOs:55 and 59; SEQ ID NOs:57 and 61; SEQ ID NOs:63 and 67; SEQ ID NOs:65 and 69; SEQ ID NOs:71 and 73; SEQ ID NOs:72 and 74; SEQ ID NOs:75 and 79; SEQ ID NOs:77 and 81; SEQ ID NOs:83 and 85; SEQ ID NOs:84 and 86; SEQ ID NOs:87 and 89; SEQ ID NOs:88 and 90; SEQ ID NOs:91 and 93; SEQ ID NOs:92 and 94; SEQ ID NOs:95 and 97; and SEQ ID NOs:96 and 98, each member aa sequence being at least 70% identical to, or differing in at most 30 aa additions, deletions or substitutions from the each sequence of each said pair, wherein the first CH3 domain comprises a different member of the pair than is comprised by the second CH3 domain, or
b. the first and the second CH3 domains each comprise an aa sequence that identical to an aa sequence of a member of the pair of CH3 aa sequences selected from the group consisting of SEQ ID NOs:31 and 35; SEQ ID NOs:33 and 37; SEQ ID NOs:39 and 43; SEQ ID NOs:41 and 45; SEQ ID NOs:47 and 51; SEQ ID NOs:49 and 53; SEQ ID NOs:55 and 59; SEQ ID NOs:57 and 61; SEQ ID NOs:63 and 67; SEQ ID NOs:65 and 69; SEQ ID NOs:71 and 73; SEQ ID NOs:72 and 74; SEQ ID NOs:75 and 79; SEQ ID NOs:77 and 81; SEQ ID NOs:83 and 85; SEQ ID NOs:84 and 86; SEQ ID NOs:87 and 89; SEQ ID NOs:88 and 90; SEQ ID NOs:91 and 93; SEQ ID NOs:92 and 94; SEQ ID NOs:95 and 97; and SEQ ID NOs:96 and 98.

136. The TFcBA of claim 124, wherein
a. the first hinge comprises an amino acid (aa) sequence that is an aa sequence selected from the group consisting of SEQ ID NOs:4, 18, 19, 20, 21, 22, 263-265 and 267-273, or the first hinge comprises an aa sequence that differs in at most 3 aa deletions, additions or substitutions from an aa sequence selected from the group consisting of SEQ ID NOs:4, 18, 19, 20, 21, 22, 263-265 and 267-273; or
b. the second hinge comprises an aa sequence that is an aa sequence selected from the group consisting of SEQ ID NOs:23, 24, 263-265 and 267-273, or the second hinge comprises an aa sequence that differs in at most 3 aa deletions, additions or substitutions from an aa sequence selected from the group consisting of SEQ ID NOs:23, 24, 263-265 and 267-273.

137. The TFcBA of claim 124, comprising a CH2 domain comprising an amino acid sequence that is at least 70% identical to SEQ ID NO:25, 26, 261 or 262, or which differs therefrom in at most 30 aa deletions, additions or substitutions.

138. The TFcBA of claim 124, wherein the TFc comprises in amino to carboxyl terminal order: a first hinge, a first CH2 domain, a first CH3 domain, a second hinge, a second CH2 domain and a second CH3 domain, wherein
a. the first hinge comprises an amino acid (aa) sequence selected from the group consisting of SEQ ID NOs:4, 18, 19, 263-265 and 267-273;
b. the first CH2 domain is aglycosylated and comprises the aa sequence set forth as SEQ ID NO:25;
c. the first CH3 domain comprises an aa sequence that is either sequence of a pair of sequences selected from the group of pairs of CH3 domain sequences consisting of SEQ ID NOs:31 and 35; SEQ ID NOs:33 and 37; SEQ ID NOs:39 and 43; SEQ ID NOs:41 and 45; SEQ ID NOs:47 and 51; SEQ ID NOs:49 and 53; SEQ ID NOs:55 and 59; SEQ ID NOs:57 and 61; SEQ ID NOs:63 and 67; SEQ ID NOs:65 and 69; SEQ ID NOs:71 and 73; SEQ ID NOs:72 and 74; SEQ ID NOs:75 and 79; SEQ ID NOs:77 and 81; SEQ ID NOs:83 and 85; SEQ ID NOs:84 and 86; SEQ ID NOs:87 and 89; SEQ ID NOs:88 and 90; SEQ ID NOs:91 and 93; SEQ ID NOs:92 and 94; SEQ ID NOs:95 and 97; and SEQ ID NOs:96 and 98;
d. the second hinge comprises an aa sequence consisting of a sequence selected from the group consisting of SEQ ID NO:23, 263-265 and 267-273;
e. the second CH2 domain is aglycosylated and comprises the aa sequence set forth in SEQ ID NO:25; and
f. the second CH3 domain comprises an aa sequence that is either sequence of a pair of sequences selected from the group of pairs of CH3 domain sequences consisting of SEQ ID NOs:31 and 35; SEQ ID NOs:33 and 37; SEQ ID NOs:39 and 43; SEQ ID NOs:41 and 45; SEQ ID NOs:47 and 51; SEQ ID NOs:49 and 53; SEQ ID NOs:55 and 59; SEQ ID NOs:57 and 61; SEQ ID NOs:63 and 67; SEQ ID NOs:65 and 69; SEQ ID NOs:71 and 73; SEQ ID NOs:72 and 74; SEQ ID NOs:75 and 79; SEQ ID NOs:77 and 81; SEQ ID NOs:83 and 85; SEQ ID NOs:84 and 86; SEQ ID NOs:87 and 89; SEQ ID NOs:88 and 90; SEQ ID NOs:91 and 93; SEQ ID NOs:92 and 94; SEQ ID NOs:95 and 97; and SEQ ID NOs:96 and 98, wherein if the first CH3 domain comprises a first sequence of a pair of sequences, the second CH3 domain comprises the second sequence of the pair of sequences; and if the first CH3 domain comprises the second sequence of a pair of sequences, the second CH3 domain comprises the first sequence of the pair of sequences.

139. The TFcBA of claim 124, wherein the TFc comprises in amino to carboxyl terminal order: a first hinge, a first CH2 domain, a first CH3 domain, a second hinge, a second CH2 domain and a second CH3 domain, wherein
a. the first hinge comprises an amino acid (aa) sequence selected from the group consisting of SEQ ID NOs:20, 21, 22, 263-265 and 267-273;
b. the first CH2 domain is aglycosylated and comprises the aa sequence set forth in SEQ ID NO:26;
c. the first CH3 domain comprises an aa sequence that is either sequence of a pair of sequences selected from the group of pairs of CH3 domain sequences consisting of SEQ ID NOs:31 and 35; SEQ ID NOs:33 and 37; SEQ ID NOs:39 and 43; SEQ ID NOs:41 and 45; SEQ ID NOs:47 and 51; SEQ ID NOs:49 and 53; SEQ ID NOs:55 and 59; SEQ ID NOs:57 and 61; SEQ ID NOs:63 and 67; SEQ ID NOs:65 and 69; SEQ ID NOs:71 and 73; SEQ ID NOs:72 and 74; SEQ ID NOs:75 and 79; SEQ ID NOs:77 and 81; SEQ ID NOs:83 and 85; SEQ ID NOs:84 and 86; SEQ ID NOs:87 and 89; SEQ ID NOs:88 and 90; SEQ ID NOs:91 and 93; SEQ ID NOs:92 and 94; SEQ ID NOs:95 and 97; and SEQ ID NOs:96 and 98;
d. the second hinge comprises an aa sequence consisting of SEQ ID NO:24, 263-265 and 267-273;
e. the second CH2 domain is aglycosylated and comprises the aa sequence set forth in SEQ ID NO:26; and
f. the second CH3 domain comprises an aa sequence that is either sequence of a pair of sequences selected from the group of pairs of CH3 domain sequences consisting of SEQ ID NOs:31 and 35; SEQ ID NOs:33 and 37; SEQ ID NOs:39 and 43; SEQ ID NOs:41 and 45; SEQ ID NOs:47 and 51; SEQ ID NOs:49 and 53; SEQ ID NOs:55 and 59; SEQ ID NOs:57 and 61; SEQ ID NOs:63 and 67; SEQ ID NOs:65 and 69; SEQ ID NOs:71 and 73; SEQ ID NOs:72 and 74; SEQ ID NOs:75 and 79; SEQ ID NOs:77 and 81; SEQ ID NOs:83 and 85; SEQ ID NOs:84 and 86; SEQ ID NOs:87 and 89; SEQ ID NOs:88 and 90; SEQ ID NOs:91 and 93; SEQ ID NOs:92 and 94; SEQ ID NOs:95 and 97; and SEQ ID NOs:96 and 98, wherein if the first CH3 domain comprises a first sequence of a pair of sequences, the second CH3 domain comprises the second sequence of the pair of sequences; and if the first CH3 domain comprises the second sequence of a pair of sequences, the second CH3 domain comprises the first sequence of the pair of sequences.

140. The TFcBA of claim 124, wherein the first or the second Fc region comprises an amino acid (aa) sequence selected from the group consisting of SEQ ID NOs:99-166, or the first or the second Fc region comprises an aa sequence that is at least 70% identical to an aa sequence selected from the group consisting of SEQ ID NOs:99-166, or differs therefrom in at most 50 aa deletions, additions or substitutions.

141. The TFcBA of claim 140, wherein either or both of the first and the second Fc region comprises an aa sequence that is at least 70% identical to one aa sequence of a pair of aa sequences selected from the group consisting of SEQ ID NOs:99 and 100; SEQ ID NOs:101 and 102; SEQ ID NOs:103 and 104; SEQ ID NOs:105 and 106; SEQ ID NOs:107 and 108; SEQ ID NOs:109 and 110; SEQ ID NOs:111 and 112; SEQ ID NOs:113 and 114; SEQ ID NOs:115 and 116; SEQ ID NOs:117 and 118; SEQ ID NOs:119 and 120; SEQ ID NOs:121 and 122; SEQ ID NOs:123 and 124; SEQ ID NOs:125 and 126; SEQ ID NOs:127 and 128; SEQ ID NOs:129 and 130; SEQ ID NOs:131 and 132; SEQ ID NOs:133 and 134; SEQ ID NOs:135 and 136; SEQ ID NOs:137 and 138; SEQ ID NOs:139 and 140; SEQ ID NOs:141 and 142; SEQ ID NOs:143 and 144; SEQ ID NOs:145 and 146; SEQ ID NOs:147 and 148; SEQ ID NOs:149 and 150; SEQ ID NOs:151 and 152; SEQ ID NOs:153 and 154; SEQ ID NOs:155 and 156; SEQ ID NOs:157 and 158; SEQ ID NOs:159 and 160; SEQ ID NOs:161 and 162; SEQ ID NOs:163 and 164; and SEQ ID NOs:165 and 166, or which differs therefrom in at most 50 aa deletions, additions or substitutions, and wherein the first Fc region comprises a different member of the pair than is comprised by the second Fc region.

142. The TFcBA of claim 140, wherein the first Fc region and the second Fc region together comprise a pair of two different members, each member being an Fc aa sequence, wherein each pair is selected from the group of pairs consisting of SEQ ID NOs:99 and 100; SEQ ID NOs:101 and 102; SEQ ID NOs:103 and 104; SEQ ID NOs:105 and 106; SEQ ID NOs:107 and 108; SEQ ID NOs:109 and 110; SEQ ID NOs:111 and 112; SEQ ID NOs:113 and 114; SEQ ID NOs:115 and 116; SEQ ID NOs:117 and 118; SEQ ID NOs:119 and 120; SEQ ID NOs:121 and 122; SEQ ID NOs:123 and 124; SEQ ID NOs:125 and 126; SEQ ID NOs:127 and 128; SEQ ID NOs:129 and 130; SEQ ID NOs:131 and 132; SEQ ID NOs:133 and 134; SEQ ID NOs:135 and 136; SEQ ID NOs:137 and 138; SEQ ID NOs:139 and 140; SEQ ID NOs:141 and 142; SEQ ID NOs:143 and 144; SEQ ID NOs:145 and 146; SEQ ID NOs:147 and 148; SEQ ID NOs:149 and 150; SEQ ID NOs:151 and 152; SEQ ID NOs:153 and 154; SEQ ID NOs:155 and 156; SEQ ID NOs:157 and 158; SEQ ID NOs:159 and 160; SEQ ID NOs:161 and 162; SEQ ID NOs:163 and 164; and SEQ ID NOs:165 and 166, each member aa sequence being at least 70% identical to, or differing in at most 30 aa additions, deletions or substitutions from each sequence of each said pair, wherein the first Fc region comprises a different member of the pair than is comprised by the second Fc region.

143. The TFcBA of claim 124 comprising a TFc comprising an amino acid (aa) sequence selected from the group consisting of SEQ ID NOs:171, 173, 175, 177, 179, 181, 183, 185, 187, 189, 191, 193, 195, 197, 199, 201, 203, 205, 207, 209, 211, 213, 215, 217, 219 and 221, or an aa sequence that is at least 70% identical to an aa sequence selected from the group consisting of SEQ ID NOs:171, 173, 175, 177, 179, 181, 183, 185, 187, 189, 191, 193, 195, 197, 199, 201, 203, 205, 207, 209, 211, 213, 215, 217, 219 and 221 or which differs therefrom in at most 30 aa additions, deletions or substitutions.

144. The TFcBA of claim 124, comprising an amino acid chain that comprises in amino to carboxyl terminal order:
a. a first heavy chain variable (VH) domain, a TFc, a connecting linker and a second VH domain, or
b. a first VH domain, a CH1 domain, a TFc, a connecting linker and a second VH domain, or
c. a first VH domain, a CH1 domain, a TFc, a connecting linker, a second VH domain, an scFv linker and a second light chain variable (VL) domain, wherein the second VH and VL domains associate to form a second binding site, or
d. a first VH domain, a CH1 domain, a TFc, a connecting linker, a second VH domain, an scFv linker and a second light chain variable (VL) domain, wherein the second VH domain and the VL domain associate to form a second binding site.

145. The TFcBA of claim 144, further comprising
a. a light chain that comprises a first VL domain that dimerizes with the first VH domain to form a first binding site, or
b. a light chain that comprises a first VL domain that dimerizes with the first VH domain to form a first binding site and further comprises a light chain constant (CL) domain that is linked to the carboxyl terminus of the VL domain.

146. The TFcBA of claim 124, wherein the first binding site is an N-terminal binding site and the second binding site is a C-terminal binding site.

147. The TFcBA of claim 145, wherein the anti-c-Met binding site
a. comprises a VH comprising either or both of a) the aa sequence of the VH Complementarity Determining Region (CDR)3 (VHCDR3) in SEQ ID NO:223 or 287 and b) a VLCDR3 comprising the aa sequence of the VLCDR3 in SEQ ID NO:231 or 289, or
b. comprises a VH domain comprising a set of three VH Complementarity Determining Regions (CDRs) comprising VHCDR1, VCDR2 and VHCDR3, wherein VHCDR1, VHCDR2 and VHCDR3 comprise the aa sequence of the VHCDR1, VHCDR2 and VHCDR3 in SEQ ID NO:223 or 231; and a VL domain comprising a set of three VLCDRs comprising VLCDR1, VLCDR2, and VLCDR3, wherein VLCDR1, VLCDR2 and VLCDR3 comprise the aa sequence of the VLCDR1, VLCDR2 and VLCDR3 in SEQ ID NO:287 or 289, respectively, or
c. comprises an N-terminal portion of the heavy chain and an N-terminal portion of the light chain, or
d. is comprised by either or both of a VH domain and a VL domain, wherein the VH domain comprises an aa sequence that is at least 70% identical to the VH domain set forth in SEQ ID NOs:223, 231, 287 or 289 or differs therefrom in at most 10 aas deletions, additions or substitution; and the VL domain comprises an aa sequence that is at least 70% identical to the VL domain set forth in SEQ ID NOs:223, 231, 287 or 289 or differs therefrom in at most 10 aas deletions, additions or substitution.

148. The TFcBA of claim 124, wherein the second binding site is
a. an anti-EGFR binding site that comprises either or both of a) a VHCDR3 comprising the amino acid (aa) sequence of the VHCDR3 in SEQ ID NO:233, 237, 258, 275, 277 or 279 and b) a VLCDR3 comprising the aa sequence of the VLCDR3 in SEQ ID NO:233, 237, 258, 275, 277 or 279, or
b. an anti-EGFR binding site that comprises a VH domain comprising a set of three VHCDRs comprising VHCDR1, VCDR2 and VHCDR3, wherein VHCDR1, VHCDR2 and VHCDR3 comprise the aa sequence of the VHCDR1, VHCDR2 and VHCDR3 in SEQ ID NO: 233, 237, 258, 275, 277 or 279; and a VL domain comprising a set of three VLCDRs comprising VLCDR1, VLCDR2, and VLCDR3, wherein VLCDR1, VLCDR2 and VLCDR3 comprise the aa sequence of the VLCDR1, VLCDR2 and VLCDR3 in SEQ ID NO:233, 237, 258, 275, 277 or 279, or
c. an anti-EGFR binding site that is comprised by either or both of a VH domain and a VL domain, wherein the VH domain comprises an aa sequence that is at least 70% identical to the VH domain set forth in SEQ ID NOs: 233, 237, 258, 275, 277 or 279 or differs therefrom in at most 10 aas deletions, additions or substitution; and the VL domain comprises an aa sequence that is at least 70% identical to the VL domain set forth in SEQ ID NOs: 233, 237, 258, 275, 277 or 279 or differs therefrom in at most 10 aas deletions, additions or substitutions, or
d. comprised by a C-terminal scFv that is entirely comprised by the heavy chain.

149. An Ab which is a TFcBA, wherein the TFcBA comprises a first binding site and a second binding site, wherein the first binding site binds to a first target and the second binding site binds to a second target, and wherein
the first and the second binding sites are linked through a TFc;
the TFc comprises a first Fc region and a second Fc region, each said first Fc region and second Fc region having a C-terminus and an N-terminus; the first Fc region and the second Fc region are linked through a TFc linker having a C-terminus and an N-terminus to form a contiguous polypeptide;
the first and the second Fc regions associate to form an Fc dimer; and
either or both of the first and the second Fc region comprise one or more aa modification to enhance or stabilize the binding between the first and the second Fc region.

150. The TFcBA of claim 149, wherein
a. the TFcBA inhibits signal transduction through either or both of the first and the second target; or
b. expression of the TFcBA in a cell produces (i) more correctly formed TFcAB molecules relative to the expression of a multivalent antibody that does not comprise a TFc or (ii) more than 80% of correctly formed TFcAB molecules as determined by Size Exclusion Chromatography (SEC).

151. The TFcBA of claim 149, wherein the first Fc region and the second Fc region comprise a first and a second CH3 domain, respectively, each said CH3 domain having a C-terminus and an N-terminus.

152. The TFcBA of claim 149, wherein the first and the second Fc regions comprise
a. a first and a second CH2 domain, respectively, each said CH2 domain having a C-terminus and an N-terminus, or
b. a first and a second hinge, respectively, each said first hinge and said second hinge having a C-terminus and an N-terminus, or
c. a first and a second hinge, respectively, each said first hinge and said second hinge having a C-terminus and an N-terminus and wherein the second hinge does not comprise an upper hinge subdomain.

153. The TFcBA of claim 152, wherein the TFc comprised in the TFcBA comprises in amino to carboxyl terminal order:
a. a first CH2 domain, a first CH3 domain, a TFc linker, a second CH2 domain and a second CH3 domain;
b. a first hinge, a first CH2 domain, a first CH3 domain, a TFc linker, a second CH2 domain and a second CH3 domain
c. a first hinge, a first CH2 domain, a first CH3 domain, a TFc linker, a second hinge, a second CH2 domain and a second CH3 domain, or
d. a first hinge, a first CH2 domain, a first CH3 domain, a TFc linker, a second hinge, a second CH2 domain and a second CH3 domain and wherein the first hinge comprises an upper hinge subdomain, a core hinge subdomain and a lower hinge subdomain and the second hinge comprises a core hinge subdomain and a lower hinge subdomain, but not an upper hinge subdomain, each said hinge sub-domain having a C-terminus and an N-terminus.

154. A TFcBA of claim 149, wherein the TFc comprised by the TFcBA comprises in amino to carboxyl terminal order: a first hinge, which is linked at its C-terminus to the N-terminus of a first CH2 domain, which is linked at its C-terminus to the N-terminus of a first CH3 domain, which is linked at its C-terminus to the N-terminus of a TFc linker, which is linked at its C-terminus to the N-terminus of a second hinge, which is linked at its C-terminus to the N-terminus of a second CH2 domain, which is linked at its C-terminus to the N-terminus of a second CH3 domain.

155. The TFcBA of claim 153, wherein the TFc linker
a. comprises 20-50 amino acids (aas), or
b. is a Gly-Ser linker, or
c. comprises (Gly4Ser)n, wherein n is 4, 5, 6, 7 or 8,
d. or,
e. wherein the TFc
f. is an IgG1 TFc, or
g. is an IgG1 TFc, or
h. is a hybrid TFc, or
i. is a hybrid TFc comprising in amino to carboxyl terminal order: a first IgG1/IgG4 hinge, a first IgG4 CH2 domain, a first IgG1 CH3 domain, a TFc linker, a second IgG4 hinge, a second IgG4 CH2 domain, and a second IgG1 CH3 domain, or
j. is an IgG1/IgG4 TFc
k. comprises in amino to carboxyl terminal order: a first IgG1 hinge, a first IgG1 CH2 domain, a first IgG1 CH3 domain, a TFc linker, a second IgG1 hinge, a second IgG1 CH2 domain, and a second IgG1 CH3 domain.

156. The TFcBA of claim 153, wherein
a. either or both of the first CH3 domain and the second CH3 domain comprise one or more aa modifications that enhance or stabilize the binding between the first and the second Fc regions, or
b. each of the first CH3 domain and the second CH3 domain comprises an amino acid modification, which modification is an Association Enhancing Modification (“AEM”) that enhances the association of the first CH3 domain with the second CH3 domain, or
c. each of the first CH3 domain and the second CH3 domain comprises an amino acid modification, which modification is an AEM that enhances the association of the first CH3 domain with the second CH3 domain, wherein the AEM is comprised by a module selected from the group consisting of AEM module 1, AEM module 2, AEM module 3 and AEM module 4.

157. The TFcBA of claim 153, wherein
a. the first CH3 and second CH3 domains together comprise a pair of two different members, each member being a CH3 amino acid (aa) sequence, each pair selected from the group of pairs consisting of SEQ ID NOs:31 and 35; SEQ ID NOs:33 and 37; SEQ ID NOs:39 and 43; SEQ ID NOs:41 and 45; SEQ ID NOs:47 and 51; SEQ ID NOs:49 and 53; SEQ ID NOs:55 and 59; SEQ ID NOs:57 and 61; SEQ ID NOs:63 and 67; SEQ ID NOs:65 and 69; SEQ ID NOs:71 and 73; SEQ ID NOs:72 and 74; SEQ ID NOs:75 and 79; SEQ ID NOs:77 and 81; SEQ ID NOs:83 and 85; SEQ ID NOs:84 and 86; SEQ ID NOs:87 and 89; SEQ ID NOs:88 and 90; SEQ ID NOs:91 and 93; SEQ ID NOs:92 and 94; SEQ ID NOs:95 and 97; and SEQ ID NOs:96 and 98, each member aa sequence being at least 70% identical to, or differing in at most 30 aa additions, deletions or substitutions from the each sequence of each said pair, wherein the first CH3 domain comprises a different member of the pair than is comprised by the second CH3 domain, or
b. the first and the second CH3 domains each comprise an aa sequence that identical to an aa sequence of a member of the pair of CH3 aa sequences selected from the group consisting of SEQ ID NOs:31 and 35; SEQ ID NOs:33 and 37; SEQ ID NOs:39 and 43; SEQ ID NOs:41 and 45; SEQ ID NOs:47 and 51; SEQ ID NOs:49 and 53; SEQ ID NOs:55 and 59; SEQ ID NOs:57 and 61; SEQ ID NOs:63 and 67; SEQ ID NOs:65 and 69; SEQ ID NOs:71 and 73; SEQ ID NOs:72 and 74; SEQ ID NOs:75 and 79; SEQ ID NOs:77 and 81; SEQ ID NOs:83 and 85; SEQ ID NOs:84 and 86; SEQ ID NOs:87 and 89; SEQ ID NOs:88 and 90; SEQ ID NOs:91 and 93; SEQ ID NOs:92 and 94; SEQ ID NOs:95 and 97; and SEQ ID NOs:96 and 98.

158. The TFcBA claim 157, wherein
a. the first hinge comprises an aa sequence that differs in at most 3 aa deletions, additions or substitutions from an aa sequence selected from the group consisting of SEQ ID NOs:4, 18, 19, 20, 21, 22, 263-265 and 267-273, or
b. the first hinge comprises an aa sequence that is an aa sequence selected from the group consisting of SEQ ID NOs:4, 18, 19, 20, 21, 22, 263-265 and 267-273, or
c. the second hinge comprises an aa sequence that differs in at most 3 aa deletions, additions or substitutions from an aa sequence selected from the group consisting of SEQ ID NOs:23, 24, 263-265 and 267-273, or
d. the second hinge comprises an aa sequence that is an aa sequence selected from the group consisting of SEQ ID NOs:23, 24, 263-265 and 267-273, or
e. the TFc comprises in amino to carboxyl terminal order: a first hinge, a first CH2 domain, a first CH3 domain, a second hinge, a second CH2 domain and a second CH3 domain, wherein
i. the first hinge comprises an aa sequence selected from the group consisting of SEQ ID NOs:4, 18, 19, 263-265 and 267-273;
ii. the first CH2 domain is aglycosylated and comprises the aa sequence set forth as SEQ ID NO:25;
iii. the first CH3 domain comprises an aa sequence that is either sequence of a pair of sequences selected from the group of pairs of CH3 domain sequences consisting of SEQ ID NOs:31 and 35; SEQ ID NOs:33 and 37; SEQ ID NOs:39 and 43; SEQ ID NOs:41 and 45; SEQ ID NOs:47 and 51; SEQ ID NOs:49 and 53; SEQ ID NOs:55 and 59; SEQ ID NOs:57 and 61; SEQ ID NOs:63 and 67; SEQ ID NOs:65 and 69; SEQ ID NOs:71 and 73; SEQ ID NOs:72 and 74; SEQ ID NOs:75 and 79; SEQ ID NOs:77 and 81; SEQ ID NOs:83 and 85; SEQ ID NOs:84 and 86; SEQ ID NOs:87 and 89; SEQ ID NOs:88 and 90; SEQ ID NOs:91 and 93; SEQ ID NOs:92 and 94; SEQ ID NOs:95 and 97; and SEQ ID NOs:96 and 98;
iv. the second hinge comprises an aa sequence consisting of a sequence selected from the group consisting of SEQ ID NO:23, 263-265 and 267-273;
v. the second CH2 domain is aglycosylated and comprises the aa sequence set forth in SEQ ID NO:25; and
vi. the second CH3 domain comprises an aa sequence that is either sequence of a pair of sequences selected from the group of pairs of CH3 domain sequences consisting of SEQ ID NOs:31 and 35; SEQ ID NOs:33 and 37; SEQ ID NOs:39 and 43; SEQ ID NOs:41 and 45; SEQ ID NOs:47 and 51; SEQ ID NOs:49 and 53; SEQ ID NOs:55 and 59; SEQ ID NOs:57 and 61; SEQ ID NOs:63 and 67; SEQ ID NOs:65 and 69; SEQ ID NOs:71 and 73; SEQ ID NOs:72 and 74; SEQ ID NOs:75 and 79; SEQ ID NOs:77 and 81; SEQ ID NOs:83 and 85; SEQ ID NOs:84 and 86; SEQ ID NOs:87 and 89; SEQ ID NOs:88 and 90; SEQ ID NOs:91 and 93; SEQ ID NOs:92 and 94; SEQ ID NOs:95 and 97; and SEQ ID NOs:96 and 98, wherein if the first CH3 domain comprises a first sequence of a pair of sequences, the second CH3 domain comprises the second sequence of the pair of sequences; and if the first CH3 domain comprises the second sequence of a pair of sequences, the second CH3 domain comprises the first sequence of the pair of sequence.

159. The TFcBA of claim 149, wherein the TFc comprises in amino to carboxyl terminal order: a first hinge, a first CH2 domain, a first CH3 domain, a second hinge, a second CH2 domain and a second CH3 domain, wherein
a.
i. the first hinge comprises an aa sequence selected from the group consisting of SEQ ID NOs:20, 21, 22, 263-265 and 267-273;
ii. the first CH2 domain is aglycosylated and comprises the aa sequence set forth in SEQ ID NO:26;
iii. the first CH3 domain comprises an aa sequence that is either sequence of a pair of sequences selected from the group of pairs of CH3 domain sequences consisting of SEQ ID NOs:31 and 35; SEQ ID NOs:33 and 37; SEQ ID NOs:39 and 43; SEQ ID NOs:41 and 45; SEQ ID NOs:47 and 51; SEQ ID NOs:49 and 53; SEQ ID NOs:55 and 59; SEQ ID NOs:57 and 61; SEQ ID NOs:63 and 67; SEQ ID NOs:65 and 69; SEQ ID NOs:71 and 73; SEQ ID NOs:72 and 74; SEQ ID NOs:75 and 79; SEQ ID NOs:77 and 81; SEQ ID NOs:83 and 85; SEQ ID NOs:84 and 86; SEQ ID NOs:87 and 89; SEQ ID NOs:88 and 90; SEQ ID NOs:91 and 93; SEQ ID NOs:92 and 94; SEQ ID NOs:95 and 97; and SEQ ID NOs:96 and 98;
iv. the second hinge comprises an aa sequence consisting of SEQ ID NO:24, 263-265 and 267-273;
v. the second CH2 domain is aglycosylated and comprises the aa sequence set forth in SEQ ID NO:26; and
vi. the second CH3 domain comprises an aa sequence that is either sequence of a pair of sequences selected from the group of pairs of CH3 domain sequences consisting of SEQ ID NOs:31 and 35; SEQ ID NOs:33 and 37; SEQ ID NOs:39 and 43; SEQ ID NOs:41 and 45; SEQ ID NOs:47 and 51; SEQ ID NOs:49 and 53; SEQ ID NOs:55 and 59; SEQ ID NOs:57 and 61; SEQ ID NOs:63 and 67; SEQ ID NOs:65 and 69; SEQ ID NOs:71 and 73; SEQ ID NOs:72 and 74; SEQ ID NOs:75 and 79; SEQ ID NOs:77 and 81; SEQ ID NOs:83 and 85; SEQ ID NOs:84 and 86; SEQ ID NOs:87 and 89; SEQ ID NOs:88 and 90; SEQ ID NOs:91 and 93; SEQ ID NOs:92 and 94; SEQ ID NOs:95 and 97; and SEQ ID NOs:96 and 98, wherein if the first CH3 domain comprises a first sequence of a pair of sequences, the second CH3 domain comprises the second sequence of the pair of sequences; and if the first CH3 domain comprises the second sequence of a pair of sequences, the second CH3 domain comprises the first sequence of the pair of sequences;
or
b. the first or the second Fc region comprises an aa sequence that is at least 70% identical to an aa sequence selected from the group consisting of SEQ ID NOs:99-166, or differs therefrom in at most 50 aa deletions, additions or substitutions, or
c. the first or the second Fc region comprises an aa sequence selected from the group consisting of SEQ ID NOs:99-166, or
d. either or both of the first and the second Fc region comprises an aa sequence that is at least 70% identical to one aa sequence of a pair of aa sequences selected from the group consisting of SEQ ID NOs:99 and 100; SEQ ID NOs:101 and 102; SEQ ID NOs:103 and 104; SEQ ID NOs:105 and 106; SEQ ID NOs:107 and 108; SEQ ID NOs:109 and 110; SEQ ID NOs:111 and 112; SEQ ID NOs:113 and 114; SEQ ID NOs:115 and 116; SEQ ID NOs:117 and 118; SEQ ID NOs:119 and 120; SEQ ID NOs:121 and 122; SEQ ID NOs:123 and 124; SEQ ID NOs:125 and 126; SEQ ID NOs:127 and 128; SEQ ID NOs:129 and 130; SEQ ID NOs:131 and 132; SEQ ID NOs:133 and 134; SEQ ID NOs:135 and 136; SEQ ID NOs:137 and 138; SEQ ID NOs:139 and 140; SEQ ID NOs:141 and 142; SEQ ID NOs:143 and 144; SEQ ID NOs:145 and 146; SEQ ID NOs:147 and 148; SEQ ID NOs:149 and 150; SEQ ID NOs:151 and 152; SEQ ID NOs:153 and 154; SEQ ID NOs:155 and 156; SEQ ID NOs:157 and 158; SEQ ID NOs:159 and 160; SEQ ID NOs:161 and 162; SEQ ID NOs:163 and 164; and SEQ ID NOs:165 and 166, or which differs therefrom in at most 50 aa deletions, additions or substitutions, and wherein the first Fc region comprises a different member of the pair than is comprised by the second Fc region, or
e. the first Fc region and the second Fc region together comprise a pair of two different members, each member being an Fc aa sequence, wherein each pair is selected from the group of pairs consisting of SEQ ID NOs:99 and 100; SEQ ID NOs:101 and 102; SEQ ID NOs:103 and 104; SEQ ID NOs:105 and 106; SEQ ID NOs:107 and 108; SEQ ID NOs:109 and 110; SEQ ID NOs:111 and 112; SEQ ID NOs:113 and 114; SEQ ID NOs:115 and 116; SEQ ID NOs:117 and 118; SEQ ID NOs:119 and 120; SEQ ID NOs:121 and 122; SEQ ID NOs:123 and 124; SEQ ID NOs:125 and 126; SEQ ID NOs:127 and 128; SEQ ID NOs:129 and 130; SEQ ID NOs:131 and 132; SEQ ID NOs:133 and 134; SEQ ID NOs:135 and 136; SEQ ID NOs:137 and 138; SEQ ID NOs:139 and 140; SEQ ID NOs:141 and 142; SEQ ID NOs:143 and 144; SEQ ID NOs:145 and 146; SEQ ID NOs:147 and 148; SEQ ID NOs:149 and 150; SEQ ID NOs:151 and 152; SEQ ID NOs:153 and 154; SEQ ID NOs:155 and 156; SEQ ID NOs:157 and 158; SEQ ID NOs:159 and 160; SEQ ID NOs:161 and 162; SEQ ID NOs:163 and 164; and SEQ ID NOs:165 and 166, each member aa sequence being at least 70% identical to, or differing in at most 30 aa additions, deletions or substitutions from each sequence of each said pair, wherein the first Fc region comprises a different member of the pair than is comprised by the second Fc region, or
f. the TFcBA comprises a TFc comprises an aa sequence that is at least 70% identical to an aa sequence selected from the group consisting of SEQ ID NOs:171, 173, 175, 177, 179, 181, 183, 185, 187, 189, 191, 193, 195, 197, 199, 201, 203, 205, 207, 209, 211, 213, 215, 217, 219 and 221 or which differs therefrom in at most 30 aa additions, deletions or substitutions, or
g. the TFcBA comprises a TFc comprising an aa sequence selected from the group consisting of SEQ ID NOs:171, 173, 175, 177, 179, 181, 183, 185, 187, 189, 191, 193, 195, 197, 199, 201, 203, 205, 207, 209, 211, 213, 215, 217, 219 and 221, or
h. the TFcBA comprises a heavy chain that comprises in amino to carboxyl terminal order: a first VH domain, a TFc, a connecting linker and a second VH domain, or
i. the TFcBA comprises a heavy chain that comprises in amino to carboxyl terminal order: a first VH domain, a CH1 domain, a TFc, a connecting linker and a second VH domain, or
j. the TFcBA comprises a heavy chain that comprises in amino to carboxyl terminal order: a first VH domain, a CH1 domain, a TFc, a connecting linker, a second VH domain, an scFv linker and a second VL domain, wherein the second VH and VL domains associate to form a second binding site, or
k. the TFcBA comprises a heavy chain that comprises in amino to carboxyl terminal order: a first VH domain, a CH1 domain, a TFc, a connecting linker, a second VH domain, an scFv linker and a second light chain variable (VL) domain, wherein the second VH and VL domains associate to form a second binding site.

160. The TFcBA of claim 159, comprising a light chain that comprises a first VL domain that dimerizes with the first VH domain to form a first binding site.

161. The TFcBA of claim 160, wherein the light chain comprises a light chain constant (CL) domain that is linked to the carboxyl terminus of the VL domain.

162. The TFcBA of claim 159, wherein the first binding site is an anti-c-Met binding site and the second binding site is an anti-EGFR binding site.

163. A monovalent Tandem Fc Antibody (TFcA), comprising a binding site that is linked to a TFc comprising a first Fc region and a second Fc region linked through a TFc linker, wherein the first and the second Fc region associate to form an Fc, and wherein either or both of the first and the second Fc region comprise one or more amino acid modifications to enhance or stabilize the binding between the first and the second Fc region.

164. A TFcBA of claim 124 that is a charge-complementary paired TFcBA, wherein a charge-complementary paired TFcBA is a TFcBA that comprises a pair of charged amino acids comprising an amino acid selected from group A and an amino acid selected from group B (a charge-complementary pair)
wherein group A comprises all natural amino acids with a pI of greater than 7 and group B comprises all natural amino acids with a pI of less than 7, or optionally wherein group A comprises His, Lys, and Arg, and group B comprises Asp, Glu, Asn, Phe, Gln, Tyr, Ser, Met, Thr, Ile, Gly, Val, Trp, Leu, Ala, and Pro; and
said charge-complementary pair consists of a first amino acid residue and a second amino acid residue, and
said charge-complementary pair is either or both of a position 297 charge-complementary pair or a position 299 charge-complementary pair, wherein
a position 297 charge-complementary pair is a charge-complementary pair with said first amino acid residue located at EU position 297 of said first Fc region and said second amino acid residue located at EU position 297 of said second Fc region, and a position 299 charge-complementary pair is a charge-complementary pair with said first amino acid residue located at EU position 299 of said first Fc region and said second amino acid residue located at EU position 299 of said second Fc region.

165. The TFcBA of claim 164, wherein the first or the second binding site binds specifically to a human protein selected from the group consisting of ErbB2, ErbB3, ErbB4, IGF1R, IGF2R, Insulin receptor, Ron, c-Met, EGFR, VEGFR1, VEGFR2, TNFR, FGFR1 FGFR2, FGFR3, FGFR4, PDGFR alpha, PDGFR beta, c-Kit, EPCAM and EphA2.

166. A pharmaceutical composition comprising a TFcBA of claim 124 and a pharmaceutically acceptable carrier.

167. A nucleic acid molecule comprising at least one or at least two coding sequences, wherein said at least one coding sequence encodes a heavy chain or a light chain of TFcBA of claim 124 and wherein said at least two coding sequences comprise one coding sequence encodes a heavy chain of a TFcBA of claim 124 and a second coding sequence encodes a light chain of the TFcBA of claim 124 and wherein the nucleic acid molecule is:
a. an isolated nucleic acid molecule, or
b. comprised by a vector, or
c. comprised by a host cell, or
d. comprised by a vector that is comprised by a host cell.

168. A method of producing a TFcBA comprising culturing a host cell of claim 167 under conditions suitable for the expression of the TFcBA, and isolating the expressed TFcBA from the culture.

169. A method of treating a subject having cancer, said method comprising administering to a subject a therapeutically effective amount of a TFcBA of claim 124.
